(19) United States
(12) Patent Application Publication
(10) Pub. No.: US 2022/0333133 A1
(43) Pub. Date: Oct. 20, 2022

(54) VECTORIZED EDITING OF NUCLEIC ACIDS TO CORRECT OVERT MUTATIONS

(71) Applicant: Voyager Therapeutics, Inc., Cambridge, CA (US)

(72) Inventors: Kelly BALES, Lincoln, MA (US); Allen NUNNALLY, Cambridge, MA (US); Donna T. WARD, Groton, MA (US); Jennifer F. BRYAN, Groton, MA (US)

(21) Appl. No.: 17/639,874

(22) PCT Filed: Sep. 3, 2020
(86) PCT No.: PCT/US2020/049104

§ 371 Date: Mar. 2, 2022

Related U.S. Application Data
(60) Provisional application No. 62/895,212, filed on Sep. 3, 2019.

(51) Int. Cl. C12N 15/86; C12N 15/11; C12N 9/22

(52) U.S. Cl. CPC C12N 15/86; C12N 15/11; C12N 9/22; C12N 2750/14143; C12N 2310/20; C12N 2800/80

(57) ABSTRACT

The disclosure relates to compositions, methods, and processes for the preparation, use, and/or formulation of adeno-associated virus (AAV) particle comprising a viral gene and a capsid, wherein the viral genome comprises at least one Vectorized Editing of Nucleic acids to correct Overt Mutations (VENOM) element.

### CROSS REFERENCE TO RELATED APPLICATION

[0001] The present application claims the benefit of priority to U.S. Provisional Patent Application No. 62/895,212, entitled “VECTORIZED EDITING OF NUCLEIC ACIDS TO CORRECT OVERT MUTATIONS”, filed Sep. 3, 2019, the contents of which are herein incorporated by reference in their entirety.

### REFERENCE TO SEQUENCE LISTING

[0002] The present application is being filed along with a Sequence Listing in electronic format. The Sequence Listing file, entitled 2057_1077PCT_SL.txt, was created on Sep. 3, 2020, and is 6,461,592 bytes in size. The information in electronic format of the Sequence Listing is incorporated herein by reference in its entirety.

### FIELD OF THE DISCLOSURE

[0003] The present disclosure relates to composition, methods, and processes for the preparation, use, and/or formulation of adeno-associated virus (AAV) particles comprising at least one element for the Vectorized Editing of Nucleic acids to correct Overt Mutations (VENOM).

### BACKGROUND

[0004] Genetic engineering where DNA can be inserted, replaced, deleted or modified in the genome of a living organism is referred to as “genome editing,” “genome engineering,” or “gene editing”. Unlike early techniques that randomly inserted genetic material into a host genome, genome editing targets the insertions to site specific locations.

[0005] And while other genome editing technologies such as zinc finger (ZFNs), transcription activator-like effector nucleases (TALENs) and homing meganuclease have recently been utilized to edit DNA in hopes of repairing genomic defect, these suffer from lack of scalability, difficulty in individualized engineering and the expense of designing a unique complex for each locus to be altered. Additionally, work has to be done to define the optimized components of a system which will be effective in exploiting the cas9 CRISPR system as a tool for research, diagnostics and therapeutics with the ultimate goal of target-specific genome editing.

[0006] The present disclosure addresses the need for new technologies for treating genetic disorders caused by abnormalities in the genome whether heritable or acquired, monogenic or multifactorial, by providing AAV-based compositions and complexes which go beyond those of the art. Provided herein are recombinant adeno-associated virus particles having at least one element for the Vectorized Editing of Nucleic acids to correct Overt Mutations (VENOM).

[0007] For delivery of VENOM elements, an AAV is used as the delivery modality for a nucleic acid sequence encoding the VENOM elements, or a fragment thereof, which results in in vivo expression of the encoded payload. The mechanism underlying the vectorized delivery of VENOM elements is thought to proceed through the following steps. First, the vector genome enters the cell via endocytosis, then escapes from the endosomal compartment and is transported to the nucleus wherein the vector genome is released and converted into a double-stranded episomal molecule of DNA by the host. The transcriptionally active episome results in the expression of encoded VENOM elements that may then be secreted from the cell into the circulation. Therefore, AAV delivery of VENOM elements may therefore enable continuous, sustained and long-term delivery by a single injection of AAV particles.

### SUMMARY

[0008] The present disclosure provides compositions, methods and processes for the design, preparation, manufacture and/or formulation of recombinant adeno-associated virus (AAV) particles having at least one element for the Vectorized Editing of Nucleic acids to correct Overt Mutations (VENOM).

[0009] Provided herein are AAV particles comprising a capsid and a vector genome which has at least one Vectorized Editing of Nucleic acids to correct Overt Mutations (VENOM) element and at least one payload.

[0010] In some aspects, the VENOM element may comprise a polynucleotide encoding at least one guide RNA (gRNA) and a promoter, and the expression of the at least one guide gRNA may be driven by the promoter. The promoter may be an RNA polymerase III-dependent promoter.

[0011] In some aspects, the VENOM element may comprise a polynucleotide encoding a first guide RNA, a second guide RNA, a donor template and a promoter, and the expression of the first guide RNA, the second guide RNA and the donor template may be driven by the promoter. The promoter may be an RNA polymerase III-dependent promoter.

[0012] In some aspects, the VENOM element may comprise at least one VENOM element comprising a polynucleotide encoding an enzyme and a promoter, and the enzyme may be, but is not limited to, Cas9, Cas9 orthologue, Cpf1 (Cas12a), Cpf1 (Cas12a) orthologue, Cas13, Cas13 orthologue, Cas13b and Cas13b orthologue. The expression of the enzyme may be driven by the promoter such as, but not limited to, a ubiquitous promoter or tissue-specific promoter. As a non-limiting example, the promoter is a ubiquitous promoter. As another non-limiting example, the promoter is a tissue-specific promoter.

[0013] In some aspects, the VENOM element comprises the polynucleotide encoding Cas9 and the expression of Cas9 may be driven by a tissue-specific promoter. The tissue-specific promoter may be, but is not limited to, a neuron specific promoter, a muscle specific promoter, a cardiac specific promoter, and a liver specific promoter.

[0014] In some aspects, the VENOM element comprises the polynucleotide encoding Cas9 and the expression of Cas9 may be driven by a constitutive promoter.

[0015] In some aspects, the VENOM element comprises the polynucleotide encoding Cas9 and the expression of Cas9 may be driven by an inducible promoter.

[0016] In some aspects, the VENOM element comprises the polynucleotide encoding Cpf1 (Cas12a) and the expression of Cpf1 (Cas12a) may be driven by a tissue-specific promoter. The tissue-specific promoter may be, but is not limited to, a neuron specific promoter, a muscle specific promoter, a cardiac specific promoter, and a liver specific promoter.

[0017] In some aspects, the VENOM element comprises the polynucleotide encoding Cpf1 (Cas12a) and the expression of Cpf1 (Cas12a) may be driven by a constitutive promoter.

[0018] In some aspects, the VENOM element comprises the polynucleotide encoding Cpf1 (Cas12a) and the expression of Cpf1 (Cas12a) may be driven by an inducible promoter.

[0019] In some aspects, the VENOM element may comprise at least one VENOM element comprising a polynucleotide encoding an enzyme and a promoter, and the enzyme may be, but is not limited to, Cas9, Cas9 orthologue, Cpf1 (Cas12a) and Cpf1 (Cas12a) orthologue, Cas13, Cas13 orthologue, Cas13b and Cas13b orthologue and further encodes at least one gRNA. The expression of the at least one gRNA may be driven by an RNA polymerase III-dependent promoter.

[0020] Also provided herein are methods for modulating the expression level or the sequence of a gene in a cell from a subject by contacting the cell with an effective amount of at least one AAV particle described herein. The expression level of the gene may be suppressed or stimulated.

[0021] In some aspects, the modulation of the sequence of the gene comprises correcting one or more mutations of the gene, a frameshift mutation which causes a premature stop codon or a truncated gene product, a disrupted reading frame via gene deletion, an aberrant splice acceptor site, or an aberrant splice donor site.

[0022] In some aspects, the modulation of the sequence of the gene comprises correcting one or more point-mutations of the gene.

[0023] In some aspects, the modulation of the sequence of the gene comprises contacting the cell with the AAV particle and a DNA donor, wherein the AAV particle comprises a viral genome encoding a first gRNA, a second gRNA, a DNA donor, a first promoter, a second promoter, a third promoter, wherein the expression of the first gRNA is controlled by the first promoter, the expression of the second gRNA is controlled by the second promoter, wherein the donor DNA comprises a single-strand oligonucleotide of 100-200 bp. The cell may be, but is not limited to, a neuronal cell, a neural stem cell, an astrocyte, an oligodendrocyte, a microglia cell, a retinal cell, a tumor cell, a hematopoietic stem cell, an insulin producing beta cell, a lung epithelium cell, an endothelial cell, a liver cell, a skeletal muscle cell, a muscle stem cell, a muscle satellite cell, or a cardiac muscle cell

[0024] In some aspects, the modulation of the sequence of the gene comprises inserting the full-length sequence or fragment of the gene.

[0025] In some aspects, modulation of the sequence of the gene comprises inserting a fragment of gene, wherein the fragment may be 1-500, 501-1000, or 1001-2000 nucleotides of the gene.

[0026] In some aspects, the modulation of the sequence of the gene comprises contacting the cell with the AAV particle comprising a viral genome encoding a first gRNA, a second gRNA, a DNA donor, a first promoter, a second promoter, and a third promoter. The expression of the first gRNA may be driven by the first promoter, the expression of the second gRNA may be driven by the second promoter, and the expression of the DNA donor may be driven by the third promoter.

[0027] In some aspects, the repair of the sequence is by homology-directed repair wherein the full-length or fragment of the gene is deleted. The fragment deleted may be 1-500, 501-1000, or 1001-2000 nucleotides of the gene.

[0028] In some aspects, the modulation of the sequence of the gene comprises contacting the cell with the AAV particle comprising a viral genome encoding a first gRNA, a second gRNA, a first promoter, and a second promoter. The expression of the first gRNA may be controlled by the first promoter, and the expression of the second gRNA may be controlled by the second promoter.

[0029] In some aspects, the modulation of the sequence of the gene is by an indel mutation and comprises contacting the cell with the AAV particle comprising a viral genome encoding one or more gRNA.

[0030] In some aspects, the repair of the sequence is by homologous end joining repair.

[0031] In some aspects, the AAV particles and methods described herein may be used to treat a disease, disorder and/or condition. As a non-limiting example, the disease, disorder and/or condition is a neurological disease such as, but not limited to, Parkinson's disease, Friedreich's Ataxia, Amyotrophic lateral sclerosis (ALS), Huntington's disease, and Spinal muscular atrophy (SMA). As a non-limiting example, the disease, disorder and/or condition is a muscular disease such as, but not limited to, Duchenne muscular disease. As a non-limiting example, the disease, disorder and/or condition is cancer.

### DETAILED DESCRIPTION

### I. Compositions

### Vectorized Editing

[0032] The present disclosure relates to compositions, methods and processes for the design, preparation, manufacture and/or formulation of recombinant adeno-associated virus (AAV) particles having at least one element for the Vectorized Editing of Nucleic acids to correct Overt Mutations (VENOM) (herein referred to as “VENOM elements”) and methods of using the same. AAV particles comprising at least one VENOM element may be referred to herein as VENOM AAV Particles (herein “VAP”).

[0033] As used herein, an “AAV particle” is a virus which comprises a vector genome with at least one payload region and at least one inverted terminal repeat (ITR) region. The AAV particle and/or its component capsid and vector genome may be engineered to alter tropism to a particular cell-type, tissue, organ or organism.

[0034] Vectors of the present disclosure may be produced recombinantly and may be based on adeno-associated virus (AAV) parent or reference sequences. As used herein, a “vector” is any molecule or moiety which transports, transduces, or otherwise acts as a carrier of a heterologous molecule such as the nucleic acids described herein.

[0035] As used herein, “vector genome” or “viral genome” refers to the nucleic acid sequence(s) encapsulated in an AAV particle. A vector genome comprises a nucleic acid sequence with at least one payload region encoding a payload and at least one ITR.

[0036] As used herein, a “payload” or “payload region” is any nucleic acid molecule which encodes one or more polypeptides. At a minimum, a payload region comprises nucleic acid sequences that encode an element for the Vectorized Editing of Nucleic acids to correct Overt Mutations (VENOM), or a fragment thereof, but may also optionally comprise one or more functional or regulatory elements to facilitate transcriptional expression and/or polypeptide translation.

[0037] The nucleic acid sequences and polypeptides disclosed herein may be engineered to contain a payload region with at least one element to modify the expression of overt mutations in a gene of interest. In some embodiments, the nucleic acid sequence comprising the payload region may comprise one or more of a promoter region, an intron, a Kozak sequence, an enhancer, or a polyadenylation sequence. The payload regions may be delivered to one or more target cells, tissues, organs, or organisms within the vector genome of an AAV particle and/or a VAP.

[0038] In some embodiments, the AAV particle and/or VAP comprises a VENOM element and a “tunable element.” As used herein, a “tunable element” or a “regulatable element” can impart regulatable or tunable feature(s) to the viral genome encoding them. In some embodiments, the VENOM element and tunable elements are the same element. In some embodiments, the VENOM element and the tunable element are different elements in the AAV particle and/or VAP.

[0039] In some embodiments, VENOM elements may be used to introduce mutations into a gene as a protection against a disease, disorder, and/or condition.

### Vectorized Editing of Nucleic Acids to Correct Overt Mutations (VENOM) Elements

### CRISPR/Cas9 and Cas9 Orthologues

[0040] In some embodiments, the VENOM element is a CRISPR genome editing element. As used herein, the term “CRISPR genome editing element” refers to any component/element involved in directing the activity of CRISPR-associated (“Cas”) proteins to alter the genome in a cell.

[0041] The CRISPR (Clustered Regularly Interspaced Short Palindromic Repeats)-Cas system is widely found in bacterial and archaeal genomes as a defense mechanism against invading viruses and mobile genetic elements such as bacteriophages and plasmids, which sometimes is called RNA-mediated adaptive immune system. A CRISPR locus in a bacterial genome is a DNA region with an array of short identically repeated sequences of generally 21-37 base pairs, separated by spacers with unique sequences of generally 20-40 base pairs. The CRISPR locus can be found on both chromosomal and plasmid DNA. The spacers are often derived from nucleic acid of invading viruses and plasmids, which can be used as recognition elements to find matching virus genomes or plasmid sequences and destroy them as part of defense system. CRISPR activity requires the presence of a set of CRISPR associated (cas) genes, which are usually found adjacent to the CRISPR array and encode CRISPR associated (Cas) proteins with a variety of predicted nucleic acid-manipulating activities such as nucleases, helicases and polymerases. The CRISPR-Cas system targets DNA and/or RNA as a way of protecting against viruses and other mobile genetic elements and can be developed for programmable genetic editing.

[0042] In bacteria, the CRISPR-Cas system relies on the activity of short mature CRISPR RNAs (crRNAs) that guide Cas proteins (e.g. Cas9) to silence invading nucleic acids. The crRNRs are processed from the DNA sequences clustered in the CRISPR array. The CRISPR array transcript, the precursor CRISPR RNA (pre-crRNA), is processed into individual short mature crRNAs. In the CRISPR-Cas type II system, a small, non-coding RNA molecule called trans-activating crRNA (tracrRNA), which has a sequence complementary to the identical repeat in the CRISPR, is required for crRNA maturation. The tracrRNA is encoded in the vicinity of the cas genes and CRISPR repeat-spacer array. Following the hybridization of tracrRNA to the short identical repeat in the pre-crRNA, the bacterial double-stranded RNA specific endoribonuclease, RNase III, processes/cleaves the pre-crRNA transcript to generate a dual-tracrRNA:crRNA that guides the CRISPR-associated endonuclease Cas9 (Csn1) to cleave site-specifically cognate target DNA.

[0043] In bacteria, CRISPR-Cas immunity operates in three steps with the principle that an intruder once memorized by the system will be remembered and silenced upon a repeated infection. During the initial adaptation phase, a part of an invading nucleic acid sequence is incorporated as a new spacer within the repeat-spacer CRISPR array and the infection is thus memorized. During the expression phase, the CRISPR array is transcribed as a pre-crRNA molecule that undergoes processing to generate short mature crRNAs, each complementary to a unique invader sequence. During the interference phase, the individual crRNAs guide Cas protein(s) to cleave the cognate invading nucleic acids in a sequence-specific manner for their ultimate destruction.

[0044] The CRISPR-Cas systems have recently been classified into three distinct types (I-III). Types I and III share some common features, with crRNAs and Cas proteins being the only known components required for the steps of expression and interference. In both types I and III, the mature crRNAs guide a complex of several Cas proteins to the cognate-invading nucleic acids and a Cas endonuclease of the ribonucleoprotein complex cleaves the target nucleic acids. Type II CRISPR-Cas has evolved distinct pre-crRNA processing and interference mechanisms, as described above. Pre-crRNA processing requires base pairing of every pre-crRNA repeat with a tracrRNA. The tracrRNA:crRNA duplex forms a ternary silencing complex in the presence of Cas9, the endonuclease of Type II CRISPR-Cas system.

[0045] Though naturally being identified as a defense mechanism in prokaryotes, the CRISPR-Cas system (e.g., the Type 11 CRISPR-Cas9 system) has been developed as a RNA-guided DNA targeting platform. It has been widely studied for the use of genomic editing and transcription modulation in eukaryotic cells, and has shown great potential in correcting mutations in human genetic diseases. As learned from the bacterial system, two distinct components are required in CRISPR-Cas based genome editing: (1) a guide RNA molecule, such as a tracrRNA:crRNA duplex and (2) an endonuclease, such as Cas9. When the guide RNA molecule and Cas9 are expressed in a cell, the guide RNA/Cas9 complex is recruited to the target sequence by the base-pairing between the guide RNA sequence and the target sequence in the genomic DNA. The recruited Cas9 cuts both strands of DNA causing a Double Strand Break (DSB). For successful location of Cas9 to the target sequence, the genomic target sequence must also contain the correct Protospacer Adjacent Motif (PAM) sequence immediately following the target sequence. Cas9 cuts 3-4 nucleotides upstream of the PAM sequence. A DSB can be repaired through one of two general repair pathways: (1) the Non-Homologous End Joining (NHEJ) DNA repair pathway, or (2) the Homology Directed Repair (HDR) pathway. The NHEJ repair pathway often results in inserts/deletions at the DSB site that can lead to frameshifts and/or premature stop codons, effectively disrupting the open reading frame (ORF) of the targeted gene. The HDR pathway requires the presence of a repair template, which is used to fix the DSB. HDR faithfully copies the sequence of the repair template to the cut target sequence. Specific nucleotide changes can be introduced into a targeted gene using HDR with a repair template.

[0046] The CRISPR-Cas9 system has been used as a tool to manipulate the genome in mammalian cells (i.e. eukaryotes). Vu et al (Wu et al., Science, 2013, 339: 819-823) and Mali et al (Mali et al., Science. 2013, 339: 823-826) first demonstrated that expressing a codon-optimized Cas9 protein and a guide RNA leads to efficient cleavage and short insertion/deletion of target loci, which could inactivate protein-coding genes by inducing frameshifts and/or creating premature stop codons. The CRISPR-cas system can be used to simultaneously edit more than one genes by delivering multiple guide RNAs (Yang et al., Cell, 2013, 154:1370-1379; and Jao et al., Proc Natl Acad Sci USA. 2013, 110:13904-13909); to introduce deletions and inversions of regions ranging from 100 bps to 1000000 bps on a chromosome (Xiao et al., Nucleic Acids Res., 2013, 41:e141; and Canver et al., J Biol Chem., 2014, 289(31): 21312-21324); to engineer chromosomal translocations between different chromosomes (Torres et al., Nat Commun. 2014, 5: 3964); to correct mutations in disease genes (Yin et al., Nat Biotechnol. 2014, 32(6): 551-553; Schwank et al., Cell Stem Cell. 2013, 13: 653-658; and Wu et al., Cell Stem Cell. 2013, 13: 659-662); and to introduce specific nucleotide modifications at the target sequence in combination with a DNA repair template containing the desired sequence but having a high degree of homology to the target sequence, for example, by cotransfection of the template DNA into the cell along with the guide RNA/Cas9 complex.

[0047] The CRISPR-Cas system has also been adapted to label proteins by introducing specific sequences such as HA-tag (Auer et al., Genome Res. 2014: 24:142-153). Other expended applications of the CRISPR-Cas system include site-specific imaging of endogenous loci in living cells, by using a fluorescent marker (e.g., GFP). In addition to human and rodent cells, the system has also been adapted to many other species, including monkey, pig, rat, zebrafish, worm, yeast, and several plants.

[0048] The CRISPR-Cas system is a remarkably flexible tool for genome manipulation. One of the primary advantages of this technology is that the nuclease activity and the DNA-binding activity of Cas9 are discrete functions in the protein. The Cas9 nuclease activity (cutting) is performed by 2 separate domains, RuvC and HNH. Each domain cuts one strand of DNA and each can be inactivated by a single point mutation. In S. pyogenes, a Cas9 D10A mutant has an inactive RuvC domain (RuvC−) and an active HNH domain (HNH+) and a Cas9 H840A mutant has an inactive HNH domain (HNH−) and an active RuvC domain (RuvC+). When both domains are inactive (D10A and H840A, RuvC− and HNH−) the Cas9 protein has no nuclease activity (catalytically inactive) and is said to be ‘dead’ (dCas9): however, the inactive dCas9 still retains the ability to bind to DNA based on guide RNA specificity. Such dCas9 protein may be used as a platform to recruit other functional proteins to a target DNA sequence.

[0049] The CRISPR-cas system may also be used to modulate transcription in a genome by introducing sequence specific control of gene expression. In some applications, a catalytically inactive dCas9 can be generated by mutating the two nuclease domains of Cas9, which can bind DNA without introducing cleavage or mutation. When targeted to a promoter, the nuclease-null dCas9 binding alone can interfere with transcription initiation, likely by blocking binding of transcription factors or RNA polymerases. When targeted to the non-template strand within the gene, the dCas9 complex blocks RNA polymerase II transcription elongation (Jinek et al., Science. 2012, 337(6096): 816-821; Qi et al., Cell. 2013, 152:1173-1183; and Gilbert et al., Cell. 2013, 154: 442-451). In other applications, the inactive or nuclease-null cas9 may be fused with effector domains with distinct regulatory functions, such as transcription repressor domains (e.g., the Krueppel-associated box (KRAB)) to lead to stronger silencing of mammalian genes (Gilbert et al., Cell, 2013, 154(2): 442-451), or with activator domains (e.g., VP64) to activate transcriptions (Larson et al., Nat Protoc. 2013, 8: 2180-2196). Such guide RNA based methods are referred to as CRISPR interference (i.e. CRISPRi) (Qi et al., Cell, 2013, 152: 1173-1183; and Larson et al., Nature Protocols, 2013, 8: 2180-2196). Such RNA based methods for regulation of gene expression in a genome-wide scale are also known as CRISPR interference ((i.e., CRISPR interference, CRISPRi).

[0050] In addition to modulating gene expression, the fusion of dCas9 with other heterologous effector domains could enable many other applications. For example, one could fuse catalytically inactive dCas9 with chromatin modifiers to change the epigenetic state of a locus (Mali et al., Nat Methods. 2013, 10:957-963: and Sander et al., Nat Biotechnol. 2014, 32: 347-355). dCas9 fused to an epitope tag(s) can be used to purify genomic DNA bound by the guide RNA. Building on the well-established concept of ChIP (Chromatin Immunoprecipitation), researchers have created enChIP (engineered DNA-binding molecule-mediated ChIP) that allows for the purification of any genomic sequence specified by a particular guide RNA. By creating pooled libraries of guide RNAs, the CRISPR-Cas system can be used in powerful genomic screening techniques or for nucleic acid enrichment (See, e.g., US patent publication NO.: 20140356867, the contents of which is herein incorporated by reference in its entirety).

[0051] Safe delivery of CRISPR/Cas endonucleases remains one of the major barriers to the widespread application of in vivo genome editing as with this type of viral delivery system, active endonucleases will remain in the retina for an extended period, making genotoxicity a significant consideration in clinical applications. One way to address this issue is to include a self-destructing “kamikaze” CRISPR/Cas system from Li et al. that disrupts the Cas enzyme itself following expression (Hum Gene Ther. 2019 Aug. 2. doi: 10.1089/hum.2019.021; the contents of which are herein incorporated by reference in their entirety). Li et al. initially designed four guide RNAs (sgRNAs) to target Streptococcus pyogenes Cas9 (SpCas9) and the selected sgRNAs were cloned into a dual AAV vector genome. One vector genome delivered SpCas9 and the other delivered sgRNAs directed against SpCas9 and the target locus. Both constructs were packaged into an AAV particle and/or VAP particle and intravitreally administered. Li et al found that a reduction of SpCas9 mRNA when the dual approached was used as compared to CRISPR/Cas alone. In some embodiments, the AAV particles and/or VAPs described herein may include a self-destructive “kamikaze” CRISPR/Cas system.

[0052] In some embodiments, the VENOM elements are CRISPR/Cas9 and they may be used to introduce mutations into a gene as a protection against a disease, disorder, and/or condition.

[0053] In some embodiments, the VENOM elements encoded in the AAV particle are Cas9, a DNA-targeting RNA, a targeter-RNA that hybridizes with a target sequence of the target DNA molecule and an activator-RNA that hybridizes with the targeter-RNA to form a double-stranded RNA duplex as described in U.S. Pat. No. 10,227,611, the contents of which are herein incorporated by reference in their entirety. As a non-limiting example, the targeter-RNA includes the 12-nucleotide crRNA sequence as described in U.S. Pat. No. 10,227,611 as SEQ ID NO: 679. As a non-limiting example, the activator-RNA includes the 67-nucleotide tracrRNA sequence as described in U.S. Pat. No. 10,227,611 as SEQ ID NO: 432.

### Cas Proteins

[0054] Currently the most commonly used RNA-guided endonuclease for genome editing in the CRISPR-Cas system is the Type II CRISPR associated (Cas) nuclease. Cas9. The Cas9 nuclease is a DNA endonuclease with two nuclease domains, namely, the N-terminal RuvC-like nuclease (RNAse H fold) and the HNH (McrA-like) nuclease domain that is located in the middle of the protein, each cleaving each of the two DNA strands. When both of these domains are active, the Cas9 protein causes double strand breaks (DSBs) in the genomic DNA. In the absence of a suitable repair template, the DSB is repaired by the Non-Homologous End Joining (NHEJ) DNA repair pathway. During NHEJ repair, InDels (insertions/deletions) may occur as a small number of nucleotides are either inserted or deleted at random at the DSB site.

[0055] Cas9 may be inactivated with both the functional domains mutated ((RuvC− and HNH−), generating a nuclease-null Cas9 (dCas9). Cas9 may also be modified as “nickase: a Cas9 protein containing a single inactive catalytic domain, either RuvC− or HNH−. With only one active nuclease domain, the Cas9 nickase cuts only one strand of the target DNA, creating a single-strand break or ‘nick’. Similar to the inactive dCas9, a Cas9 nickase is still able to bind DNA based on guide RNA specificity, though nickases will only cut one of the DNA strands. A single-strand break, or nick, is normally quickly repaired through the HDR pathway, using the intact complementary DNA strand as the template. Two proximal, opposite strand nicks introduced by a Cas9 nickase (often referred to as a ‘double nick’ or ‘dual nickase’ CRISPR system) are treated as a Double Strand Break (DSB), which can be repaired by either NHEJ or HDR depending on the desired effect on the gene target.

[0056] The most commonly used Cas9 is derived from Streptococcus pyogenes and the RuvC domain can be inactivated by a D10A mutation and the HNH domain can be inactivated by an H840A mutation.

[0057] In addition to Cas9 derived from S. pyogenes, other RNA guided endonucleases (RGEN) may also be used for programmable genome editing. Cas9 sequences have been identified in more than 600 bacterial strains. Though Cas9 family shows high diversity of amino acid sequences and protein sizes, all Cas9 proteins share a common architecture with a central HNH nuclease domain and a split RuvC/RHase H domain. Examples of Cas9 orthologs from other bacterial strains including but not limited to, Cas proteins identified in Acaryochloris marina MBIC 11017; Acetohalobium arabaticum DSM 5501; Acidithiobacillus caldus; Acidithiobacillus ferrooxidans ATCC 23270; Alicyclobacillus acidocaldarius LAA1; Alicyclobacillus acidocaldarius subsp. acidocaldarius DSM 446; Allochromatium vinosum DSM 180; Ammonfex degensii KC4; Anabaena variabilis ATCC 29413; Arthrospira maxima CS-328; Arthrospira platensis str. Paraca; Arthrospira sp. PCC 8005; Bacillus pseudomycoides DSM 12442; Bacillus selenitireducens MLS10; Burkholderiales bacterium 1_1_47; Caldicellulosiruptor becscii DSM 6725; Candidatus Desulforudis audaxviator MP104C; Caldicellulosiruptor hydrothermalis_108; Clostridium phage c-st; Clostridium botulinum A3 str. Loch Maree; Clostridium botulinum Ba4 str. 657; Clostridium difficile QCD-63q42; Crocosphaera watsonii WH 8501; Cyanothece sp. ATCC 51142; Cyanothece sp. CCY0110; Cyanothece sp. PCC 7424; Cyanothece sp. PCC 7822; Exiguobacterium sibiricum 255-15; Finegoldia magna ATCC 29328; Ktedonobacter racemifer DSM 44963; Lactobacillus delbrueckii subsp. bulgaricus PB2003/044-T3-4; Lactobacillus salivarius ATCC 11741; Listeria innocua; Lyngbva sp. PCC 8106; Marinobacter sp. ELB17; Methanohalobium evestigatum Z-7303; Microcystis phage Ma-LMM01; Microcystis aeruginosa NIES-843; Microscilla marina ATCC 23134; Microcoleus chthonoplastes PCC 7420; Neisseria meningitidis; Nitrosococcus halophilus Nc4; Nocardiopsis dassonvillei subsp. dassonvillei DSM 43111; Nodularia spumigena CCY9414; Nostoc sp. PCC 7120; Oscillatoria sp. PCC 6506; Pelotomaculum_thermopropionicum_SI; Petrotoga mobilis SJ95; Polaromonas naphthalenivorans CJ2; Polaromonas sp. JS666; Pseudoalteromonas haloplanktis TAC125; Streptomyces pristinaespiralis ATCC 25486; Streptomyces pristnaespiralis ATCC 25486; Streptococcus thermophilus; Streptomyces viridochromogenes DSM 40736; Streptosporangium roseum DSM 43021; Synechococcus sp. PCC 7335; and Thermosipho africanus TCF52B (Chylinski et al., RNA Biol., 2013; 10(5): 726-737).

[0058] In addition to Cas9 orthologs, other Cas9 variants such as fusion proteins of inactive dCas9 and effector domains with different functions may be served as a platform for genetic modulation.

[0059] Cas12 is a type V CRISPR-CAS system and is also known as Cpf1 or C2c1. It is a compact enzyme from Francisella novicida, Acidaminococcus sp., Lachnospiracaea sp., and Prevotella sp. that is about 1,100 to 1,300 amino acids in length with a guide spacer that is 18-25 nucleotides and a total guide length of 42-44 nucleotides. Cas12 creates staggered cuts in dsDNA and creates a 5 nucleotide 5′ overhang when it cuts. Cas12 also processes its own guide RNAs which leads to increased multiplexing ability. Recently it was determined that Cas12a can cut single-stranded DNA once it is activated by a target DNA molecule matching the spacer sequence.

[0060] In some embodiments, the VENOM element is Cas12.

[0061] In some embodiments, the VENOM element is Cas12a.

[0062] In some embodiments, a Cas12a and a CRISPR array can be encoded in a single transcript using a stabilizer tertiary RNA structure as described by Campa et al. (Multiplexed genome engineering by Cas12a and CRISPR arrays encoded on single transcripts, Nature Methods 2019, doi.org/10.1038/s41592-019-0508-6; the contents of which are herein incorporated by reference in their entirety). Using this method, Campa et al. noted that up to 25 individual CRISPR RNAs can be delivered on a single plasmid. As a non-limiting example, the VENOM elements are Cas12a and a CRISPR array. As a non-limiting example, the VENOM element is Cas12a and a CRISPR array encoded in a single transcript using a stabilizer tertiary RNA structure.

[0063] Type V CRISPR systems have several differences from Type II systems. For example, Cas12 is a single RNA-guided endonuclease that, in contrast to Type II systems, lacks tracrRNA and thus are processed into mature crRNAs without the requirement of an additional trans-activating tracrRNA. Cas12 also uses a T-rich protospacer-adjacent motif (PAM) such that Cas12-crRNA complexes efficiently cleave target DNA preceded by a short T-rich PAM so Type V systems cleave at a point that is distant from the PAM.

[0064] Cas13 is a Type VI CRISPR-Cas system and is also known as C2c2 or CasRx. It is different than most of the other CRISPR systems because Cas13 targets RNA and not DNA. This is beneficial as Cas13 can be used as a therapeutic for influencing gene expression without altering the genome sequence of the subject. Cas13 is from Leptotrichia buccalis, Leptotrichia shahii, Ruminococcus flavefaciens, Bergeyella zoohelcum, Prevotella buccae, and Listeria seeligeri, and is about 900 to 1,300 amino acids in length with a guide spacer length of 22-30 nucleotides and a total guide length of 52-66 nucleotides. Once Cas13 is activated by a ssRNA sequence which is complementary to its crRNA spacer, Cas13 destroys all nearby RNA regardless of the sequence.

[0065] In some embodiments, the VENOM element is Cas13. As a non-limiting example, the Cas13 VENOM element may be used in diagnostics in vitro. As another non-limiting example, the Cas13 VENOM element can be used for specific RNA knockdown or RNA sequence editing in mammalian cells.

[0066] In some embodiments, the VENOM element is Cas13 or a variant of Cas13.

[0067] In some embodiments, the VENOM element may target any of the Cas13 or Cas13 orthologues as described in International Patent Publication No. WO2019005884. WO2019071048, and WO2019084062, the contents of each of which are herein incorporated by reference in their entirety.

[0068] In some embodiments, the VENOM element is Cas13b.

[0069] In some embodiments, the VENOM element is any of the Cas13b orthologues as described in International Patent Publication No. WO2018170333, the contents of which are herein incorporated by reference in their entirety.

[0070] In some embodiments, the VENOM element may target any of the Cas13 orthologues as described in International Patent Publication No. WO201905886, the contents of which are herein incorporated by reference in their entirety.

[0071] In some embodiments, the VENOM element may include or target any of the RNA-targeting CRISPR effector proteins as described in International Patent Publication No. WO2019018423, the contents of which are herein incorporated by reference in its entirety.

[0072] The present disclosure provides compositions, methods and processes for the design, preparation, manufacture and/or formulation of recombinant adeno-associated virus (AAV) particles having at least one element for the Vectorized Editing of Nucleic acids to correct Overt Mutations (VENOM).

[0073] In some embodiments, AAV particles and/or VAPs comprising a capsid and a vector genome which has at least one Vectorized Editing of Nucleic acids to correct Overt Mutations (VENOM) element and at least one payload.

[0074] In some embodiments, the VENOM element may comprise a polynucleotide encoding at least one guide RNA (gRNA) and a promoter, and the expression of the at least one guide gRNA may be driven by the promoter. The promoter may be an RNA polymerase III-dependent promoter.

[0075] In some embodiments, the VENOM element may comprise a polynucleotide encoding a first guide RNA, a second guide RNA, a donor template and a promoter, and the expression of the first guide RNA, the second guide RNA and the donor template may be driven by the promoter. The promoter may be an RNA polymerase Ill-dependent promoter.

[0076] In some embodiments, the VENOM element may comprise at least one VENOM element comprising a polynucleotide encoding an enzyme and a promoter, and the enzyme may be, but is not limited to, Cas9, Cas9 orthologue, Cpf1 (Cas12a) and Cpf1 (Cas12a) orthologue, Cas13, Cas13 orthologue, Cas13b and Cas13b orthologue. The expression of the enzyme may be driven by the promoter such as, but not limited to, a ubiquitous promoter and tissue-specific promoter. As a non-limiting example, the promoter is a ubiquitous promoter. As another non-limiting example, the promoter is a tissue-specific promoter.

[0077] In some embodiments, the VENOM element comprises the polynucleotide encoding Cas9 and the expression of Cas9 may be driven by a tissue-specific promoter. The tissue-specific promoter may be, but is not limited to, a neuron specific promoter, a muscle specific promoter, a cardiac specific promoter, and a liver specific promoter.

[0078] In some embodiments, the VENOM element comprises the polynucleotide encoding Cas9 and the expression of Cas9 may be driven by a constitutive promoter.

[0079] In some embodiments, the VENOM element comprises the polynucleotide encoding Cas9 and the expression of Cas9 may be driven by an inducible promoter.

[0080] In some embodiments, the VENOM element comprises the polynucleotide encoding Cpf1 (Cas12a) and the expression of Cpf1 (Cas12a) may be driven by a tissue-specific promoter. The tissue-specific promoter may be, but is not limited to, a neuron specific promoter, a muscle specific promoter, a cardiac specific promoter, and a liver specific promoter.

[0081] In some embodiments, the VENOM element comprises the polynucleotide encoding Cpf1 (Cas12a) and the expression of Cpf1 (Cas12a) may be driven by a constitutive promoter.

[0082] In some embodiments, the VENOM element comprises the polynucleotide encoding Cpf1 (Cas12a) and the expression of Cpf1 (Cas12a) may be driven by an inducible promoter.

[0083] In some embodiments, the VENOM element may comprise at least one VENOM element comprising a polynucleotide encoding an enzyme and a promoter, and the enzyme may be, but is not limited to, Cas9, Cas9 orthologue, Cpf1 (Cas12a), Cpf1 (Cas12a) orthologue, Cas13, Cas13 orthologue, Cas13b and Cas13b orthologue and further encodes at least one gRNA. The expression of the at least one gRNA may be driven by an RNA polymerase III-dependent promoter.

[0084] In some embodiments, the VENOM element is a CRISPR variant from Prevotella and Francisella 1 (CPF1). Non-limiting examples of CPF1 (Cas12a) variants which may be used in the AAV particles of the present disclosure include those taught in US Patent Publication No. US20180030425, the contents of which are herein incorporated by reference in their entirety. Examples of CPF1 (Cas12a) variants with an altered PAM specificity are described in US Patent Publication No. US20190010481, the contents of which are herein incorporated by reference in their entirety.

[0085] In some embodiments, the VENOM element is a fusion protein which includes a catalytically inactive Lachnospiraceae bacterium D2006 protein Cpf1 (dLbCpf1) fused to at least one activation domain. Non-limiting examples of the fusion proteins are described in International Patent Publication No. WO2018195540, the contents of which are herein incorporated by reference in their entirety.

[0086] In some embodiments, provided are methods for modulating the expression level or the sequence of a gene in a cell from a subject by contacting the cell with an effective amount of at least one AAV particle. The expression level of the gene may be suppressed or stimulated.

[0087] In some embodiments, the modulating the sequence of the gene comprises correcting one or more mutations of the gene, a frameshift mutation which causes a premature stop codon or a truncated gene product, a disrupted reading frame via gene deletion, an aberrant splice acceptor site, or an aberrant splice donor site.

[0088] In some embodiments, the modulating the sequence of the gene comprises correcting one or more point-mutations of the gene.

[0089] In some embodiments, the modulating the sequence of the gene comprises contacting the cell with the AAV particle and a DNA donor, wherein the AAV particle comprises a viral genome encoding a first gRNA, a second gRNA, a DNA donor, a first promoter, a second promoter, a third promoter, wherein the expression of the first gRNA is controlled by the first promoter, the expression of the second gRNA is controlled by the second promoter, wherein the donor DNA comprises a single-strand oligonucleotide of 100-200 bp. The cell may be, but is not limited to, a neuronal cell, a neural stem cell, an astrocyte, an oligodendrocyte, a microglial cell, a retinal cell, a tumor cell, a hematopoietic stem cell, an insulin producing beta cell, a lung epithelium cell, an endothelial cell, a liver cell, a skeletal muscle cell, a muscle stem cell, a muscle satellite cell, or a cardiac muscle cell

[0090] In some embodiments, the modulating the sequence of the gene comprises inserting the full-length sequence or fragment of the gene.

[0091] In some embodiments, modulating the sequence of the gene comprises inserting a fragment of gene, wherein the fragment may be 1-500, 501-1000, or 1001-2000 nucleotides of the gene.

[0092] In some embodiments, the modulating the sequence of the gene comprises contacting the cell with the AAV particle comprising a viral genome encoding a first gRNA, a second gRNA, a DNA donor, a first promoter, a second promoter, and a third promoter. The expression of the first gRNA may be driven by the first promoter, the expression of the second gRNA may be driven by the second promoter, and the expression of the DNA donor may be driven by the third promoter.

[0093] In some embodiments, the repair of the sequence is by homology-directed repair wherein the full-length or fragment of the gene is deleted. The fragment deleted may be 1-500, 501-1000, or 1001-2000 nucleotides of the gene.

[0094] In some embodiments the modulating the sequence of the gene comprises contacting the cell with the AAV particle comprising a viral genome encoding a first gRNA, a second gRNA, a first promoter, and a second promoter. The expression of the first gRNA may be controlled by the first promoter, and the expression of the second gRNA may be controlled by the second promoter.

[0095] In some embodiments, the modulating the sequence of the gene is by an indel mutation and comprises contacting the cell with the AAV particle comprising a viral genome encoding one or more gRNA.

[0096] In some embodiments, the repair of the sequence is by homologous end joining repair.

[0097] In some embodiments, the AAV particles and methods described herein may be used to treat a disease, disorder and/or condition. As a non-limiting example, the disease, disorder and/or condition is a neurological disease such as, but not limited to, Parkinson's disease, Friedreich's Ataxia, Amyotrophic lateral sclerosis (ALS), Huntington's disease, and Spinal muscular atrophy (SMA). As a non-limiting example, the disease, disorder and/or condition is a muscular disease such as, but not limited to, Duchenne muscular disease. As a non-limiting example, the disease, disorder and/or condition is cancer.

[0098] In some embodiments, the VENOM element includes or is used with a genome-editing nuclease and/or customizable DNA-binding domain fusion protein described in International Patent Publication No. WO2018071892, the contents of which are herein incorporated by reference in its entirety.

### Nucleobase Editing

[0099] In some embodiments, the VENOM element is a nucleobase editing molecule which causes specific nucleotides to convert to a different nucleotide. As a non-limiting example, the nucleobase editing molecule is a DNA base editing molecule. As another non-limiting example, the nucleobase editing molecule is an RNA base editing molecule.

[0100] In some embodiments, the nucleobase editing molecule is a programmable RNA base editing molecule. As a non-limiting example, the programmable RNA base editing molecule may be RESCUE (RNA Editing for Specific C to U Exchange), as described by Abudayyeh et al., 2019 (see Abudayyeh et al., 2019, Science July 26; 365(6451):382-386, the contents of which are herein incorporated by reference in their entirety). As another non-limiting example, the programmable RNA base editing molecule may be REPAIR (RNA editing for programmable A to 1 (G) replacement), as described by Cox et al., 2017 (see Cox et al., 2018, Science November 24; 358(6366):1019-1027, the contents of which are herein incorporated by reference in their entirety). The RESCUE and REPAIR programmable RNA base editing molecules may be used separately or in combination.

[0101] In some embodiments, RESCUE may enable cytidine (C) to uridine (U) RNA editing of dsRNA in mammalian cells. RESCUE may comprise a cytidine deaminase synthetically evolved from the adenine deaminase domain of adenosine deaminase acting on RNA ADAR2 (ADAR2dd) fused to a catalytically inactivated RNA-targeting CRISPR-Cas13 (dCas13). ADAR2dd may be fused to dRanCas13b, which is the catalytically inactive Cas13b ortholog from Riemerella anatipestifer. In some embodiments, dRanCas13b is equivalent to dPsPcas13b, which is the catalytically inactive Cas13b ortholog from Prevotella sp. P5-125. In some embodiments, the RESCUE construct comprises dRanCas13b.

[0102] In some embodiments, mutations in RESCUE through ADAR2dd may allow for direct interactions with the RNA target within a catalytic pocket, which may enable fitting of either adenosine or cytidine for deamination. In some embodiments, RESCUE may comprise a cytidine deaminase. In some embodiments, RESCUE may comprise an adenine deaminase.

[0103] In some embodiments, mutations in the RESCUE catalytic core, such as but not limited to V351G and K3501, modulate RESCUE activity. In some embodiments, mutations in RESCUE contacting the RNA target, such as but not limited to S486A and S495N, modulate RESCUE activity.

[0104] In some embodiments, RESCUE retains adenosine deaminase activity and the native pre-CRISPR(cr)RNA processing of Cas13b enables multiplexed adenine and cytosine deamination. In such embodiments, the delivery of RESCUE along with a pre-CRISPR(cr)RNA may target an adenine and cytosine in a transcript.

[0105] In some embodiments, RESCUE is optimally active with C or U base-flips across the target base using guides. In certain embodiments, the guides may be 30 nucleotides (nt) in length. In certain other embodiments the guides follow guide design rules. In some embodiments, the guide design rule relates to features of the motif, including but not limited to preference for a 5′ U or A. In other instances, the guide rule may relate to a mismatch position. In some embodiments tailored guide RNAs may be used to enable RESCUE multiplexed C-to-U and A-to-I editing.

[0106] In some embodiments, the targetable amino acid codon space of RESCUE may enable modulation of post-translational modifications, such as but not limited to phosphorylation, glycosylation, and methylation.

[0107] In some embodiments, the targetable amino acid codon space of RESCUE may enable targeting of catalytic residues.

[0108] In some embodiments, the targetable amino acid codon space of RESCUE may enable targeting of disease mutations.

[0109] In some embodiments, the targetable amino acid codon space of RESCUE may enable targeting of protective alleles.

[0110] In some embodiments, RESCUE constructs may be shortened for viral delivery to cells or subjects. In some embodiments, the RESCUE construct may be shortened via truncations, such as but not limited to C-terminal truncations. In certain embodiments, the C-terminal truncations may be of the catalytically inactive Cas13b, which may be dRanCas13b. In some embodiments, RESCUE constructs shortened for viral delivery to cells or subjects may exhibit enhanced deaminase activity.

[0111] In some embodiments amino acid conversions possible using cytidine deamination by RESCUE include, but are not limited, to Leu-to-Phe, Gln-to-stop, His-to-Tyr, Ala-to-Val, Pro-to-Ser, Pro-to-Leu, Ser-to-Leu, Ser-to-Phe, Thr-to-Lle, Thr-to-Met, Arg-to-stop, Arg-to-Cys and Arg-to-Trp conversions.

[0112] In some embodiments, REPAIR comprises a Cas13b enzyme. As a non-limiting example, Cas13b may be from Prevotella sp. P5-125 (PspCas13b, also referred to herein as dCas13b). As another non-limiting example, Cas13b may be from Porphyromonas gulae (PguCas13b) C terminally fused to the HIV Rev nuclear export sequence (NES). As yet another non-limiting example. Cas13b may be from Riemerella anatipestifer (RanCas13b)C-terminally fused to the mitogen-activated protein kinase NES.

[0113] In some embodiments, REPAIR comprises a Cas13b enzyme that possesses pre-CRISPR-RNA processing activity to allow for multiplex editing of multiple variants.

[0114] In some embodiments, REPAIR may comprise PspCas13b that is engineered to lack nuclease activity via mutations in conserved catalytic residues in the higher eukaryotes and prokaryotes nucleotide-binding (HEPN) domain.

[0115] In some embodiments, REPAIR comprises human ADAR1dd or ADAR2dd containing hyperactivating mutations that may enhance catalytic activity. As a non-limiting example, the hyperactivating mutation may be E1008Q (ADAR1dd). As another non-limiting example, the hyperactivating mutation may be E488Q (ADAR2dd).

[0116] In some embodiments dCas13b-ADAR1dd(E1008Q) may require a longer guide RNA than dCas13b-ADAR2dd(E488Q), which is functional with a number of RNA guide lengths and has greater editing efficiency.

[0117] In some embodiments REPAIR uses guide RNAs comprising spacers. As a non-limiting example, the spacers are 30 nt in length. As another non-limiting example, the spacers are 50nt in length.

[0118] In some embodiments, REPAIR comprises a linker between dCas13b and ADAR2dd (E488Q).

[0119] In some embodiments, REPAIR comprises the ADAR2dd with the E488Q mutation fused to catalytically inactive PsPCas13b, which may also be referred to herein as dCas13b. In some embodiments, engineered dCas13b-ADARdd fusions naturally deaminates adenosines to inosines, a base that functionally mimics guanosine in the cell, in dsRNA.

[0120] In some embodiments, a guide RNA that hybridizes with the target RNA may generate the requisite duplex RNA substrate for editing and recruiting of the dCas13b-ADARdd fusion comprising REPAIR. The guide RNA crRNA component hybridizes to bases surrounding the target adenosine. The mismatch cytidine in the crRNA opposite the target may enhance the RNA editing reaction to promote adenosine deamination to inosine. In some embodiments, REPAIR comprises a mismatched cytidine opposite the target adenosine that may increase deamination frequency.

[0121] In some embodiments, REPAIR may be used for RNA editing in mammalian cells.

[0122] In some embodiments, REPAIR is localized to the cytoplasm of cells.

[0123] In some embodiments, REPAIR directly deaminates target adenosines to inosines without relying on endogenous cellular repair pathways for desired editing outcomes and therefore may be used in post-mitotic cells. As a non-limiting example, the post-mitotic cell is a neuron.

[0124] In some embodiments, destabilizing REPAIR ADAR2dd(E488Q)-RNA binding may selectively decrease off-target editing. As a non-limiting example, REPAIR ADAR2dd(E488Q)-RNA binding is destabilized by applying a rational mutagenesis strategy to vary ADAR2dd(E488Q) residues that contact the RNA duplex.

[0125] In some embodiments, the REPAIR ADAR2dd(E488Q) is mutated. As a nonlimiting example, ADAR2dd(E488Q) is mutated to generate in ADAR2dd(E488QMT375G).

[0126] In some embodiments, REPAIR may be used for RNA editing of disease-relevant mutations. The disease-relevant mutations may be G to A mutations. As a non-limiting example, the disease relevant mutation may be 878G to A (AVPR2 W293X) in X-linked nephrogenic diabetes insipidus.

[0127] In some embodiments, REPAIR may be used for the treatment of diseases associated with temporary changes in cell state, such as but not limited to inflammation.

[0128] In some embodiments, REPAIR may be used to modify the function of proteins involved in disease-related signal transduction. As a non-limiting example, REPAIR may be used to recode serine, threonine and tyrosine residues targeted for phosphorylation by kinases in neurodegenerative diseases and/or conditions, such as but not limited to Alzheimer's disease.

[0129] In some embodiments, REPAIR may be used to transiently or chronically alter the sequence of expressed, risk-modifying G-to-A variants to decrease the chance of entering a disease state for patient. As a non-limiting example, REPAIR may be used to functionally mimic A-to-G alleles of the Interferon Induced With Helicase C Domain 1 (IFIH1) gene to protect against autoimmune disorders, such as but not limited to type I diabetes and systemic lupus erythematosus.

[0130] In some embodiments, REPAIR constructs may be modified for packaging into therapeutically relevant viral vectors, such as but not limited to, AAV vectors. As a non-limiting examples constructs may be modified by C terminal truncations of dCas13 fused to ADAR2dd(E488Q). As another non-limiting example, constructs may be modified by N terminal truncations of dCas13 fused to ADAR2dd(E488Q).

[0131] The REPAIR method has no strict sequence constraints and can be used to edit full-length transcripts containing mutations. A variant of the REPAIR method may be used when more specificity is needed. REPAIRv2 as described by Cox et al (Science. 2017 Nov. 24; 358(6366): 1019-1027. doi:10.1126/science.aaq0180) is a method that is at least 919 more specific than REPAIR and is more adaptable to viral delivery.

[0132] In some embodiments, the REPAIR method uses the mutant ADAR2dd(E488Q/T375G).

[0133] Adenine base editors (ABEs) mediate conversion of A to T and G to C in genomic DNA. Gaudelli et al. reported a tRNA adenosine deaminase to operate on DNA when fused to a catalytically impaired CRISPR-Cas9 (Nature. 2017 Nov. 23; 551(7681): 464-471. doi:10.1038/nature24644; the contents of which are herein incorporated by reference). ABEs are able to introduce point mutations more efficiently and cleanly than the Cas9 nuclease-based method, induce less off-target genome modification than Cas9, and install disease-correcting or disease-suppressing mutations in cells. Additionally, ABEs are able to introduce mutations without double-stranded cleavage.

[0134] In some embodiments, the VENOM element is an ABE and can mediate conversion of A to T and G to C in genomic DNA.

[0135] Base editor 3 (BE3) converts C to G base pairs or T to A base pairs in a variety of cell lines and with a higher efficiency and lower indel frequency than what can be achieved using other genome editing methods (Komor A. et al. Programmable editing of a target base in genomic DNA without double-stranded DNA cleavage. Nature. 2016; 533:420-424 and Komor et al., Sci. Adv. 2017; 3: eaao4774: the contents of which are herein incorporated by reference in their entireties). In order to operate efficiently, BE3 requires the presence of an NGG PAM that places the target C within a five-nucleotide window near the PAM-distal end of the protospacer, but this limits the number of sites in the human genome that can be efficiently targeted by BE3. In order to expand the number of sites that could be targeted, Kim et al. replaced the nickase form of SpCas9 with that of SaCas9 in BE3 to generate APEBEC1-SaCas9n-UG1 (SaBE3) which can mediate base editing at sites not accessible to BE3 (Nat Biotechnol. 2017 April; 35(4): 371-376. doi:10.1038/nbt.3803; the contents of which are herein incorporated by reference in their entireties).

[0136] In some embodiments, the VENOM element is a BE3 and can mediate conversion of C to G base pairs or T to A base pairs in genomic DNA.

[0137] In some embodiments, the VENOM element is a SaBE3 and can mediate conversion of C to G base pairs or T to A base pairs in genomic DNA.

[0138] The targeting range of base editors can be expanded by using engineered Cas9 variants that expand or alter PAM specificities (see Kim et al. Nat Biotechnol. 2017 April; 35(4): 371-376. doi:10.1038/nbt.3803; the contents of which are herein incorporated by reference in their entireties). Non-limiting examples of engineered Cas9 variants includes SpCas9 variants that accept NGA (VQR-Cas9), NGAN (VQR-BE3), NGAG (EQR-Cas9, EQR-BE3) or NGCG (VRER-Cas9, VRER-BE3) PAM sequences or SaCas9 variants that contain three mutations (SaKKH-BE3) that expand the PAM requirement to NNNRRT (SaKKH-BE3).

[0139] In some embodiments, the VENOM element is an engineered Cas9 variants that expand or alter PAM specificities. As a non-limiting example, the engineered Cas9 variant is VQR-Cas9, VQR-BE3, EQR-Cas9, EQR-BE3, VRER-Cas9, VRER-BE3, SaKKH-BE3, SaKKH-BE3.

[0140] In some embodiments, the VENOM element is a SpCas9 variant that contains four point mutations N497A, R661A, Q695A and Q926A.

[0141] In some embodiments, the VENOM element is a BE3 variant that contains four point mutations N497A, R661A, Q695A and Q926A and is called HF-BE3 as described by Rees et al. (Nature Communications, 8:15790, DOI: 10.1038/ncomms15790; the contents of which are incorporated by reference in their entirety).

[0142] In some embodiments, nucleobase editing may be used to introduce a stop codon into a gene. The introduction of the stop codon may be used to stop the expression of toxic repeats in a subject. As a non-limiting example, the introduction of the stop codon may be used to treat autosomal dominant disorders.

[0143] In some embodiments, nucleobase editing may be used to introduce a protective mutation into a gene. The mutation may be introduced adjacent to the aspartyl protease beta-site in a gene. As a non-limiting example, nucleobase editing may be used to introduce the protective mutation (A673T) in the APP gene to protects against Alzheimer's disease and cognitive decline in the elderly. As a non-limiting example, nucleobase editing may be used to introduce the protective mutation adjacent to the aspartyl protease beta-site in the APP gene to protects against Alzheimer's disease and cognitive decline in the elderly.

[0144] In some embodiments, nucleobase editing may be used to correct a gene mutation which causes a disease, disorder and/or condition.

[0145] In some embodiments, nucleobase editing may be used to correct a gene mutation which causes a neurological disease in a subject. As a non-limiting example, the neurological disease is Alzheimer's Disease.

[0146] In some embodiments, the nucleobase editing may be used to correct a gene mutation in that APP gene which causes Alzheimer's Disease. As a non-limiting example, the mutation is V717I.

[0147] In some embodiments, the REPAIR method may be used for nucleobase editing to correct the V717I mutation in the APP gene. This correction may be used to treat or reduce the symptoms of Alzheimer's Disease.

[0148] In some embodiments, the CRISPR-Cas system described in US Patent Publication No. US20170073670, the contents of which are incorporated by reference in their entirety, may be used as the VENOM element. As a non-limiting example, the VENOM element may be a nucleic acid-modifying enzyme complex wherein a nucleic acid sequence-recognizing module that specifically binds to a target nucleotide sequence in a given double stranded DNA and a nucleic acid base converting enzyme are bonded and the nucleic acid sequence-recognizing module is a CRISPR-Cas system wherein at least one DNA cleavage ability of Cas is inactivated, which complex converts one or more nucleotides in the targeted site to other one or more nucleotides or deletes one or more nucleotides, or inserts one or more nucleotides into said targeted site, without cleaving at least one strand of said double stranded DNA in the targeted site.

[0149] In some embodiments, the CRISPR-Cas system described in US Patent Publication No. US20170321210, the contents of which are incorporated by reference in their entirety, may be used as the VENOM element. As a non-limiting example, the VENOM element may be a nucleic acid-modifying enzyme complex wherein a nucleic acid sequence-recognizing module that specifically binds to a target nucleotide sequence in a given double stranded DNA and DNA glycosylase with sufficiently low reactivity with a DNA having an unrelaxed double helix structure (unrelaxed DNA) are bonded, which converts one or more nucleotides in the targeted site to other one or more nucleotides or deletes one or more nucleotides, or inserts one or more nucleotides into said targeted site, without cleaving at least one strand of said double stranded DNA in the targeted site.

[0150] In some embodiments, the CRISPR-Cas system described in US Patent Publication No. US20190024098, the contents of which are incorporated by reference in their entirety, may be used as the VENOM element. As a non-limiting example, the VENOM element may be a nucleic acid-modifying enzyme complex for modifying a targeted site of a double stranded DNA in a host cell, the complex comprising (a) a crRNA comprising a sequence complementary to a target strand of a target nucleotide sequence in the given double stranded DNA, and (b) a nucleic acid-modifying enzyme complex comprising a protein group constituting Cascade, and a nucleic acid base converting enzyme that has formed a complex with any protein in the protein group.

[0151] In some embodiments, the CRISPR-Cas system described in EP Patent Publication No. EP3348638, the contents of which are incorporated by reference in their entirety, may be used as the VENOM element. As a non-limiting example, the VENOM element may be a nucleic acid-modifying enzyme complex of a nucleic acid sequence-recognizing module that specifically binds to a target nucleotide sequence in a double stranded DNA of a gram-positive bacterium and a nucleic acid base converting enzyme bonded to each other, which complex converts one or more nucleotides in the targeted site to other one or more nucleotides or deletes one or more nucleotides, or inserts one or more nucleotides into said targeted site, without cleaving at least one strand of said double stranded DNA in the targeted site and is functionable in the gram-positive bacterium.

[0152] In some embodiments, the CRISPR-Cas system described in US Patent Publication No. US20190085342, the contents of which are incorporated by reference in their entirety, may be used as the VENOM element. As a non-limiting example, the VENOM element may be a nucleic acid-modifying enzyme complex wherein a nucleic acid sequence-recognizing module that specifically binds to a target nucleotide sequence in a double stranded DNA of a monocot cell and a nucleic acid base converting enzyme are bonded, which functions in the monocot cell and converts one or more nucleotides in the targeted site to other one or more nucleotides or deletes one or more nucleotides, or inserts one or more nucleotides into said targeted site, without cleaving at least one strand of said double stranded DNA in the targeted site.

[0153] In some embodiments, the CRISPR-Cas system described in EP Patent Publication No. EP3447139, the contents of which are incorporated by reference in their entirety, may be used as the VENOM element. As a non-limiting example, the VENOM element may be a nucleic acid-modifying enzyme complex wherein a nucleic acid sequence-recognizing module that specifically binds to a target nucleotide sequence in a given double-stranded DNA, a nucleic acid base converting enzyme and a base excision repair inhibitor are bonded, which complex converts one or more nucleotides in the targeted site to other one or more nucleotides or deletes one or more nucleotides, or inserts one or more nucleotides into said targeted site, without cleaving at least one strand of said double-stranded DNA in the targeted site, wherein the nucleic acid sequence-recognizing module is a CRISPR-Cas system wherein at least one DNA cleavage ability of Cas is inactivated.

[0154] In some embodiments, the Cas9 fusion protein described in U.S. Pat. No. 10,167,457, the contents of which are incorporated by reference in their entirety, may be used as the VENOM element. As a non-limiting example, the fusion protein may comprise: (i) a Cas9 domain, wherein the Cas9 domain when in conjunction with a bound guide RNA (gRNA) specifically binds to a target nucleic acid sequence; (ii) a cytidine deaminase domain, wherein the cytidine deaminase domain deaminates a cytosine base in a single-stranded portion of the target nucleic acid sequence when in conjunction with the Cas9 domain and the gRNA; and (iii) an uracil glycosylase inhibitor (UGI) domain, wherein the UGI domain inhibits a uracil-DNA glycosylase. The Cas9 domain may be a Cas9 nickase (nCas9) domain that cuts a nucleotide target strand of a nucleotide duplex. The nucleotide target strand may be the strand that binds to the gRNA. The cytidine deaminase domain is a deaminase from an apolipoprotein B mRNA-editing complex (APOBEC) family deaminase such as, but not limited to, OBEC1 deaminase, APOBEC2 deaminase, APOBEC3A deaminase, APOBEC3B deaminase, APOBEC3C deaminase, APOBEC3D deaminase. APOBEC3F deaminase. APOBEC3G deaminase, and APOBEC3H deaminase.

[0155] In some embodiments, any of the adenosine deaminases may be used as a VENOM element for base editing as described in U.S. Pat. No. 10,113,163, the contents of which are incorporated by reference in their entirety. As a non-limiting example, the adenosine deaminase may include any of the mutations described in U.S. Pat. No. 10,113,163, such as, but not limited to, those taught in Table 4.

[0156] In some embodiments, VENOM elements may be used to introduce unnatural amino acids into proteins. As a non-limiting example, the unnatural amino acids may be introduced using base editing as described in International Patent Publication No. WO2018039438, the contents of which are incorporated by reference in their entirety.

[0157] In some embodiments, a split Cas9 protein as described in US Patent publication No. US20180127780, the contents of which are incorporated by reference in their entirety, may be used as a VENOM element. The split Cas9 may be used alone or in combination with a nucleobase editor in order to form a complete and functional gene editing mechanism.

[0158] In some embodiments, VENOM elements may be used to introduce protective and/or loss of function variants of a gene. As a non-limiting example, the VENOM element may be the CRISPR/Cas9-based nucleobase editor described in WO2018119359 and WO2018119354, the contents of each of which are incorporated by reference in their entirety. Introduction of the protective and/or loss of function variants of a gene may treat or reduce the symptoms of the disease, disorder and/or condition.

[0159] In some embodiments, a VENOM element may be used to introduce heteroclitic or cryptic peptides that are more immunogenic than the native peptide derived from the tumor associated antigens. The heteroclitic or cryptic peptides are able to elicit a strong tumor-specific immune response and can inhibit tumor growth and metastasis. Non-limiting examples of nucleobase editors which can be used as VENOM elements are described in International Patent Publication No. WO2018165631, the contents of which are incorporated by reference in their entirety.

[0160] In some embodiments, a nucleobase editor capable of inducing a cytosine (C) to guanine (G) change in a nucleic acid as described in International Patent Publication No. WO2018165629, the contents of which are incorporated by reference in their entirety, may be used as a VENOM element. As a non-limiting example, the VENOM element may encode a fusion protein comprising (i) a nucleic acid programmable DNA binding protein (napDNAbp), and (ii) a cytidine deaminase domain, and (iii) a uracil binding protein (UBP).

[0161] In some embodiments, targeted editing of nucleic acids may be achieved using the fusion proteins as described in US Patent Publication No. US20180312828, the contents of which are incorporated by reference in their entirety. As a non-limiting example, VENOM elements may encode fusion proteins of nucleic acid programmable DNA binding proteins (napDNAbp), e.g., Cpf1 or variants thereof, and nucleic acid editing proteins or protein domains, e.g., deaminase domains.

[0162] In some embodiments, the VENOM elements may be regulated using the ligand-responsive self-cleaving catalytic RNAs (aptazymes) which are incorporated into guide RNAs as described in International Patent Publication No. WO2018209320, the contents of which are incorporated by reference in their entirety. As a non-limiting example, the aptazyme may be any of those described in International Patent Publication No. WO2018209320. The aptazyme may include a ribozyme and may be, but is not limited to, a hammerhead ribozyme and a ligand-responsive ribozyme.

[0163] In some embodiments, the VENOM element may be an evolved base editor such as, but not limited to, the APOBEC1. CDA, and AID cytidine deaminase domains described in International Patent Publication No. WO2019023680, the contents of which are incorporated by reference in their entirety. As a non-limiting example, the evolved base editor may be obtained as a result of the phage-assisted continuous evolution (PACE) system.

[0164] In some embodiments, the VENOM element may be an adenosine nucleobase editor such as, but not limited to, the adenosine nucleobase editor described in International Patent Publication No. WO2019079347, the contents of which are incorporated by reference in their entirety. As a non-limiting example, the adenosine nucleobase editor may introduce a point mutation that increases the expression of a gene which is currently under-expressed and is thus causing a disease, disorder and/or condition.

[0165] In some embodiments, the VENOM element may be a nucleobase editor such as, but not limited to, the nucleobase editor described in International Patent Publication No. WO2018165504, the contents of which are incorporated by reference in their entirety. As a non-limiting example, the adenosine nucleobase editor may introduce a point mutation that increases the expression of a gene which is currently under-expressed and is thus causing a disease, disorder and/or condition.

[0166] In some embodiments, the VENOM element may be a Cas9 variant as described in US Patent Publication No. US20160215276, the contents of which are incorporated by reference in their entirety. As a non-limiting example, the Cas9 variant may be a dimer or tetramer of a fusion protein wherein the fusion protein comprises two domains: (i) a nuclease-inactivated Cas9 (dCas9); and (ii) a recombinase catalytic domain.

[0167] In some embodiments, guide RNAs (gRNAs) may be used to activity and/or improving the specificity of RNA-programmable endonucleases, such as Cas9. Non-limiting examples of methods controlling the activity and/or improving the specificity of RNA-programmable endonucleases are described in U.S. Pat. No. 9,228,207, the contents of which are incorporated by reference in their entirety. Also provided in U.S. Pat. No. 9,228,207 are sgRNAs which may be used to control the activity and/or improve the specificity of RNA-programmable endonucleases.

[0168] In some embodiments, the VENOM element may for modifying a cytosine in a target locus. International Patent Publication No. WO2018213726, the contents of which are herein incorporated by reference in its entirety, describes various methods proteins and molecules which may be used to modify cytosine. As a non-limiting example. Cytosine may be modified in a target locus of interest, by delivering to the locus (a) a Cpf1 nickase protein, (b) a guide molecule which comprises a guide sequence linked to a direct repeat; and (c) a cytidine deaminase protein or catalytic domain thereof. The cytidine deaminase protein or catalytic domain thereof may be covalently or non-covalently linked to said Cpf1 nickase protein or the guide molecule or may be adapted to link thereto after delivery. The guide molecule may form a complex with the Cpf1 nickase protein and direct the complex to bind a first DNA strand at a target locus of interest.

[0169] In some embodiments, the VENOM element may be or include an adenosine deaminase as described in International Patent Publication No. WO2019005884 and WO2019071048, the contents of each which are herein incorporated by reference in its entirety.

[0170] In some embodiments, the VENOM element may be or include a cytidine deaminase as described in International Patent Publication No. WO2019005886, the contents of which are herein incorporated by reference in its entirety.

[0171] In some embodiments, the VENOM element may be or include a base editing (BE) technology as described in International Patent Publication No. WO2018218188, the contents of which are herein incorporated by reference in its entirety.

[0172] In some embodiments, the VENOM element may cause nuclcobase mutations in a gene of interest. As a non-limiting example, the nucleobase mutation may be A to G or T to C using the deaminases described in International Patent Publication No. WO2019079347, the contents of which are herein incorporated by reference in its entirety.

### Single Homology Arm Donor Mediated Intron-Targeting Integration (SATI)

[0173] Most gene editing methods require two homology arms for gene editing. However, Suzuki et al. have recently described precise in vivo gene editing via a single homology arm and intron-targeting gene integration (Cell Research (2019) 0:1-16; doi.org/10.1038/s41422-019-0213-0; the contents of which are herein incorporated by reference in their entireties). The single homology arm provides reduces the amount of homology needed for the gene editing machine to attach to the target gene but it does not address the common issue that incorrect mutations (including deletions) can occur during the cutting and insertion of the new sequence. To address this aspect, Suzuki et al. have discovered that if you target the intron for gene integration, the effect of these undesired mutations is minimized since the intron is not translated. This method is called Single homology Arm donor mediated intron-Targeting Integration (SATI) and allows for the targeting of a broad range of mutations and cell types

[0174] In some embodiments, the VENOM element is SATI.

[0175] In some embodiments, the SATI method may be used to correct a gene mutation which causes a disease, disorder and/or condition.

### Switches

[0176] A number of switches that function to regulate transgene expression in the context of cell systems and animal models have been described. One such mechanism of regulation relies on a chemical agent, such as a drug, or a physiological stimulus that acts as a switch to turn the expression of a transgene on or off. The most extensively studied regulatory switch mechanism is the Tet ON/OFF system, in which a tet repressor protein can only activate transcription from a promoter with a tet response element in the presence or absence of teracyclin, first described by Bujard and Gossen (Proc Natl Acad Sci USA. 1992 Jun. 15; 89(12):5547-51, Tight control of gene expression in mammalian cells by tetracycline-responsive promoters; the contents of which are herein incorporated by reference in its entirety). Several ligand and hormone regulatable systems, which employ the dimerization of two separate proteins for activation or repression, have also been described.

[0177] Approaches in which a second transgene encodes a regulatory enzyme such as a CRE recombinase, which modulates expression of a target transgene through site specific recombination, is extensively used in transgenic mouse studies, where a tissue restricted or temporally restricted expression pattern is desired.

[0178] In addition, transgene expression can also be controlled through regulation of transcript mRNA stability or protein stability, through the inclusion of stabilizing or destabilizing elements.

### Adeno-Associated Viruses (AAVs) and AAV Particles

[0179] Adeno-associated viruses (AAV) are small non-enveloped icosahedral capsid viruses of the Parvoviridae family characterized by a single stranded DNA vector genome. Parvoviridae family viruses consist of two subfamilies: Parvovirinae, which infect vertebrates, and Densovirinae, which infect invertebrates. The Parvoviridae family comprises the Dependovirus genus which includes AAV, capable of replication in vertebrate hosts including, but not limited to, human, primate, bovine, canine, equine, and ovine species.

[0180] The parvoviruses and other members of the Parvoviridae family are generally described in Kenneth 1. Berns, “Parvoviridae: The Viruses and Their Replication,” Chapter 69 in FIELDS VIROLOGY (3d Ed. 1996), the contents of which are incorporated by reference in their entirety.

[0181] AAV have proven to be useful as a biological tool due to their relatively simple structure, their ability to infect a wide range of cells (including quiescent and dividing cells) without integration into the host genome and without replicating, and their relatively benign immunogenic profile. The genome of the virus may be manipulated to contain a minimum of components for the assembly of a functional recombinant virus, or viral particle, which is loaded with or engineered to target a particular tissue and express or deliver a desired payload.

[0182] The wild-type vector genome is a linear, single-stranded DNA (ssDNA) molecule approximately 5,000 nucleotides (nt) in length. Inverted terminal repeats (ITRs) traditionally cap the vector genome at both the 5′ and the 3′ end, providing origins of replication for the vector genome. While not wishing to be bound by theory, an AAV vector genome typically comprises two ITR sequences. These ITRs have a characteristic T-shaped hairpin structure defined by a self-complementary region (145nt in wild-type AAV) at the 5′ and 3′ ends of the ssDNA which form an energetically stable double stranded region. The double stranded hairpin structures comprise multiple functions including, but not limited to, acting as an origin for DNA replication by functioning as primers for the endogenous DNA polymerase complex of the host viral replication cell.

[0183] The wild-type AAV vector genome further comprises nucleotide sequences for two open reading frames, one for the four non-structural Rep proteins (Rep78, Rep68, Rep52. Rep40, encoded by Rep genes) and one for the three capsid, or structural, proteins (VP1, VP2, VP3, encoded by capsid genes or Cap genes). The Rep proteins are important for replication and packaging, while the capsid proteins are assembled to create the protein shell of the AAV, or AAV capsid. Alternative splicing and alternate initiation codons and promoters result in the generation of four different Rep proteins from a single open reading frame and the generation of three capsid proteins from a single open reading frame. Though it varies by AAV serotype, as a non-limiting example, for AAV9/hu.14 (SEQ ID NO: 123 of U.S. Pat. No. 7,906,111, the contents of which are herein incorporated by reference in their entirety) VP1 refers to amino acids 1-736, VP2 refers to amino acids 138-736, and VP3 refers to amino acids 203-736. In other words, VP1 is the full-length capsid sequence, while VP2 and VP3 are shorter components of the whole. As a result, changes in the sequence in the VP3 region, are also changes to VP1 and VP2, however, the percent difference as compared to the parent sequence will be greatest for VP3 since it is the shortest sequence of the three. Though described here in relation to the amino acid sequence, the nucleic acid sequence encoding these proteins can be similarly described. Together, the three capsid proteins assemble to create the AAV capsid protein. While not wishing to be bound by theory, the AAV capsid protein typically comprises a molar ratio of 1:1:10 of VP1:VP2:VP3. As used herein, an “AAV serotype” is defined primarily by the AAV capsid. In some instances, the ITRs are also specifically described by the AAV serotype (e.g., AAV2/9).

[0184] For use as a biological tool, the wild-type AAV vector genome can be modified to replace the rep/cap sequences with a nucleic acid sequence comprising a payload region with at least one ITR region. Typically, in recombinant AAV vector genomes there are two ITR regions. The rep/cap sequences can be provided in trans during production to generate AAV particles and/or VAPs.

[0185] In addition to the encoded heterologous payload, vector genomes may comprise the vector genome, in whole or in part, of any naturally occurring and/or recombinant AAV serotype nucleotide sequence or variant. AAV variants may have sequences of significant homology at the nucleic acid (genome or capsid) and amino acid levels (capsids), to produce constructs which are generally physical and functional equivalents, replicate by similar mechanisms, and assemble by similar mechanisms. Chiorini et al., J. Vir. 71: 6823-33(1997); Srivastava et al., J. Vir. 45:555-64 (1983): Chiorini et al., J. Vir. 73:1309-1319 (1999); Rutledge et al., J. Vir. 72:309-319 (1998); and Wu et al., J. Vir. 74: 8635-47 (2000), the contents of each of which are incorporated herein by reference in their entirety.

[0186] In some embodiments, AAV particles and/or VAPs of the present disclosure are recombinant AAV viral vectors which are replication defective and lacking sequences encoding functional Rep and Cap proteins within their vector genome. These defective vector genomes may lack most or all parental coding sequences and essentially carry only one or two AAV ITR sequences and the nucleic acid of interest for delivery to a cell, a tissue, an organ, or an organism.

[0187] In some embodiments, the vector genome of the AAV particles and/or VAPs of the present disclosure comprise at least one control element which provides for the replication, transcription, and translation of a coding sequence encoded therein. Not all of the control elements need always be present as long as the coding sequence is capable of being replicated, transcribed, and/or translated in an appropriate host cell. Non-limiting examples of expression control elements include sequences for transcription initiation and/or termination, promoter and/or enhancer sequences, efficient RNA processing signals such as splicing and polyadenylation signals, sequences that stabilize cytoplasmic mRNA, sequences that enhance translation efficacy (e.g., Kozak consensus sequence), sequences that enhance protein stability, and/or sequences that enhance protein processing and/or secretion.

[0188] According to the present disclosure, AAV particles and/or VAPs for use in therapeutics and/or diagnostics comprise a virus that has been distilled or reduced to the minimum components necessary for transduction of a nucleic acid payload or cargo of interest. In this manner, AAV particles and/or VAPs are engineered as vehicles for specific delivery while lacking the deleterious replication and/or integration features found in wild-type viruses.

[0189] In addition to single stranded AAV vector genomes (e.g., ssAAVs), the present disclosure also provides for self-complementary AAV (scAAVs) vector genomes, scAAV vector genomes contain DNA strands which anneal together to form double stranded DNA. By skipping second strand synthesis, scAAVs allow for rapid expression in the transduced cell.

[0190] In some embodiments, the AAV particle and/or VAP of the present disclosure is an scAAV.

[0191] In some embodiments, the AAV particle and/or VAP of the present disclosure is an ssAAV.

[0192] Methods for producing and/or modifying AAV particles and/or VAPs are disclosed in the art such as pseudotyped AAV vector genomes (PCT Patent Publication Nos. WO200028004; WO200123001: WO2004112727; WO2005005610; and WO2005072364, the content of each of which is incorporated herein by reference in its entirety).

[0193] AAV particles and/or VAPs may be modified to enhance the efficiency of delivery. Such modified AAV particles and/or VAPs can be packaged efficiently and be used to successfully infect the target cells at high frequency and with minimal toxicity. In some embodiments, the capsids of the AAV particles and/or VAPs are engineered according to the methods described in US Publication Number US20130195801, the contents of which are incorporated herein by reference in their entirety.

[0194] In some embodiments, the AAV particles and/or VAPs comprising a payload region encoding the polypeptides may be introduced into mammalian cells.

### AAV Serotypes

[0195] AAV particles and/or VAPs of the present disclosure may comprise or be derived from any natural or recombinant AAV serotype. According to the present disclosure, the AAV particles and/or VAPs may utilize or be based on a serotype or include a peptide selected from any of the following VOY101, VOY201, AAVPHP.B (PHP.B), AAVPHP.A (PHP.A), AAVG2B-26, AAVG2B-13, AAVTH1.1-32. AAVTH1.1-35, AAVPHP.B2 (PHP.B2), AAVPHP.B3 (PHP.B3), AAVPHP.N/PHP.B-DGT, AAVPHP.B-EST, AAVPHP.B-GGT, AAVPHP.B-ATP, AAVPHP.B-ATT-T, AAVPHP.B-DGT-T, AAVPHP.B-GGT-T, AAVPHP.B-SGS, AAVPHP.B-AQP, AAVPHP.B-QQP, AAVPHP.B-SNP(3), AAVPHP.B-SNP, AAVPHP.B-QGT, AAVPHP.B-NQT, AAVPHP.B-EGS, AAVPHP.B-SGN, AAVPHP.B-EGT, AAVPHP.B-DST, AAVPHP.B-DST. AAVPHP.B-STP, AAVPHP.B-PQP, AAVPHP.B-SQP, AAVPHP.B-QLP, AAVPHP.B-TMP, AAVPHP.B-TTP, AAVPHP.S/G2A12, AAVG2A15/G2A3 (G2A3), AAVG2B4 (G2B4), AAVG2B5 (G2B5), PHP.S, AAV1, AAV2, AAV2G9, AAV3, AAV3a. AAV3b, AAV3-3, AAV4, AAV4-4, AAV5, AAV6, AAV6.1, AAV6.2, AAV6.1.2, AAV7, AAV7.2, AAV8, AAV9, AAV9.11. AAV9.13, AAV9.16, AAV9.24, AAV9.45, AAV9.47, AAV9.61, AAV9.68, AAV9.84, AAV9.9, AAV10, AAV11, AAV12, AAV16.3. AAV24.1, AAV27.3, AAV42.12, AAV42-1b, AAV42-2, AAV42-3a. AAV42-3b, AAV42-4, AAV42-5a, AAV42-5b, AAV42-6b, AAV42-8, AAV42-10, AAV42-11, AAV42-12, AAV42-13, AAV42-15, AAV42-aa, AAV43-1. AAV43-12, AAV43-20, AAV43-21, AAV43-23, AAV43-25, AAV43-5, AAV44.1, AAV44.2, AAV44.5, AAV223.1. AAV223.2, AAV223.4, AAV223.5, AAV223.6, AAV223.7, AAV1-7/rb.48, AAV1-8/rh.49, AAV2-15/rh.62, AAV2-3/rh.61, AAV2-4/rh.50, AAV2-5/rh.51, AAV3.1/hu.6, AAV3.1/hu.9, AAV3-9/rh.52, AAV3-11/rh.53, AAV4-8/r11.64, AAV4-9/rh.54, AAV4-19/rh.55, AAV5-3/rh.57, AAV5-22/rh.58, AAV7.3/hu.7, AAV16.8/hu.10, AAV16.12/hu.11, AAV29.3/bb.1, AAV29.5/bb.2, AAV106.1/hu.37, AAV114.3/hu.40, AAV127.2/hu.41, AAV127.5/hu.42, AAV128.3/hu.44, AAV130.4/hu.48, AAV145.1/hu.53, AAV145.5/hu.54, AAV145.6/hu.55, AAV161.10/hu.60, AAV161.6/hu.61, AAV33.12/hu.17, AAV33.4/hu.15, AAV33.8/hu.16, AAV52/hu.19, AAV52.1/hu.20, AAV58.2/hu.25, AAVA3.3, AAVA3.4, AAVA3.5, AAVA3.7, AAVC1, AAVC2, AAVC5, AAV-DJ, AAV-DJ8, AAVF3. AAVF5, AAVH2, AAVrh.72, AAVhu.8, AAVrh.68, AAVrh.70, AAVp1.1, AAVpi.3, AAVpi.2, AAVrh.60, AAVrh.44, AAVrh.65, AAVrh.55, AAVrh.47, AAVrb.69, AAVrh.45, AAVrh.59, AAVhu.12, AAVH6, AAVLK03, AAVH-1/hu.1, AAVH-5/hu.3, AAVLG-10/rh.40, AAVLG-4/rh.38, AAVLG-9/hu.39, AAVN721-8/rh.43, AAVCh.5. AAVCh.5R1, AAVcy.2, AAVcy.3, AAVcy.4, AAVcy.5, AAVCy.5R1, AAVCy.5R2, AAVCy.5R3, AAVCy.5R4, AAVcy.6, AAVhu.1, AAVhu.2, AAVhu.3, AAVhu.4, AAVhu.5, AAVhu.6, AAVhu.7, AAVhu.9, AAVhu.10, AAVhu.11, AAVhu.13, AAVhu.15, AAVhu.16, AAVhu.17, AAVhu.18, AAVhu.20, AAVhu.21, AAVhu.22, AAVhu.23.2, AAVhu.24, AAVhu.25, AAVhu.27, AAVhu.28, AAVhu.29. AAVhu.29R. AAVhu.31, AAVhu.32, AAVhu.34, AAVhu.35, AAVhu.37, AAVhu.39, AAVhu.40, AAVhu.41, AAVhu.42, AAVhu.43, AAVhu.44, AAVhu.44R1, AAVhu.44R2, AAVhu.44R3, AAVhu.45, AAVhu.46, AAVhu.47, AAVhu.48, AAVhu.48R1, AAVhu.48R2, AAVhu.48R3, AAVhu.49, AAVhu.51, AAVhu.52, AAVhu.54, AAVhu.55, AAVhu.56, AAVhu.57, AAVhu.58, AAVhu.60, AAVhu.61, AAVhu.63, AAVhu.64, AAVhu.66, AAVhu.67, AAVhu.14/9, AAVhu.t 19, AAVrh.2, AAVrh.2R, AAVrh.8, AAVrh.8R, AAVrh.10. AAVrh.12, AAVrh.13, AAVrh.13R, AAVrh.14, AAVrh.17. AAVrh.18, AAVrh.19, AAVrh.20, AAVrh.21, AAVrh.22, AAVrh.23, AAVrh.24, AAVrh.25, AAVrh.31. AAVrh.32, AAVrh.33, AAVrh.34, AAVrh.35, AAVrh.36, AAVrh.37, AAVrh.37R2, AAVrh.38, AAVrh.39, AAVrh.40, AAVrh.46, AAVrh.48, AAVrh.48.1, AAVrh.48.1.2, AAVrh.48.2, AAVrh.49, AAVrb.51, AAVrh.52, AAVrh.53, AAVrh.54, AAVrh.56, AAVrh.57, AAVrh.58, AAVrb.61, AAVrh.64, AAVrh.64R1, AAVrh.64R2, AAVrh.67. AAVrh.73, AAVrh.74, AAVrh8R. AAVrh8R A586R mutant, AAVrh8R R533A mutant, AAAV, BAAV, caprine AAV, bovine AAV, AAVhE1.1. AAVhEr1.5, AAVhER1.14, AAVhEr1.8, AAVhEr1.16, AAVhEr1.18, AAVhEr1.35, AAVhEr1.7, AAVhEr1.36, AAVhEr2.29, AAVhEr2.4, AAVhEr2.16, AAVhEr2.30, AAVhEr2.31, AAVhEr2.36, AAVhER1.23. AAVhEr3.1, AAV2.5T, AAV-PAEC, AAV-LK01, AAV-LK02, AAV-LK03, AAV-LK04, AAV-LK05, AAV-LK06, AAV-LK07, AAV-LK08, AAV-LK09, AAV-LK10, AAV-LK 11, AAV-LK12, AAV-LK13, AAV-LK14, AAV-LK15, AAV-LK16, AAV-LK17. AAV-LK18, AAV-LK19. AAV-PAEC2, AAV-PAEC4, AAV-PAEC6, AAV-PAEC7, AAV-PAEC8, AAV-PAEC11, AAV-PAEC12, AAV-2-pre-miRNA-101, AAV-8h, AAV-8b, AAV-h, AAV-b, AAV SM 10-2, AAV Shuffle 100-1, AAV Shuffle 100-3, AAV Shuffle 100-7, AAV Shuffle 10-2, AAV Shuffle 10-6, AAV Shuffle 10-8, AAV Shuffle 100-2. AAV SM 10-1, AAV SM 10-8, AAV SM 100-3, AAV SM 100-10, BNP61 AAV, BNP62 AAV, BNP63 AAV, AAVrh.50, AAVrh.43, AAVrh.62, AAVrh.48, AAVhu.19, AAVhu.11, AAVhu.53, AAV4-8/rh.64, AAVLG-9/hu.39, AAV54.5/hu.23, AAV54.2/hu.22, AAV54.7/hu.24, AAV54.1/hu.21, AAV54.4R/hu.27, AAV46.2/hu.28, AAV46.6/hu.29, AAV128.1/hu.43, true type AAV (ttAAV), UPENN AAV 10, Japanese AAV 10 serotypes, AAV CBr-7.1, AAV CBr-7.10, AAV CBr-7.2, AAV CBr-7.3, AAV CBr-7.4, AAV CBr-7.5, AAV CBr-7.7, AAV CBr-7.8, AAV CBr-B7.3, AAV CBr-B7.4, AAV CBr-E1, AAV CBr-E2, AAV CBr-E3, AAV CBr-E4, AAV CBr-E5, AAV CBr-e5, AAV CBr-E6, AAV CBr-E7, AAV CBr-E8, AAV CHt-1, AAV CHt-2, AAV CHt-3, AAV CHt-6.1, AAV CHt-6.10, AAV CHt-6.5, AAV CHt-6.6, AAV CHt-6.7, AAV CHt-6.8, AAV CHt-P1, AAV CHt-P2, AAV CHt-P5, AAV CHt-P6, AAV CHt-P8, AAV CHt-P9, AAV CKd-1, AAV CKd-10, AAV CKd-2. AAV CKd-3, AAV CKd-4, AAV CKd-6, AAV CKd-7. AAV CKd-8, AAV CKd-B1, AAV CKd-B2, AAV CKd-B3, AAV CKd-B4, AAV CKd-B5, AAV CKd-B6, AAV CKd-B7, AAV CKd-B8, AAV CKd-H1, AAV CKd-H2, AAV CKd-H3, AAV CKd-H4, AAV CKd-H5, AAV CKd-H6, AAV CKd-N3, AAV CKd-N4. AAV CKd-N9, AAV CLg-F1, AAV CLg-F2, AAV CLg-F3, AAV CLg-F4, AAV CLg-F5, AAV CLg-F6, AAV CLg-F7, AAV CLg-F8, AAV CLv-1, AAV CLv1-1, AAV Clv1-10, AAV CLv1-2, AAV CLv-12, AAV CLv1-3, AAV CLv-13, AAV CLv1-4, AAV Clv1-7, AAV Clv1-8, AAV Clv1-9, AAV CLv-2, AAV CLv-3, AAV CLv-4, AAV CLv-6, AAV CLv-8, AAV CLv-D1, AAV CLv-D2, AAV CLv-D3, AAV CLv-D4, AAV CLv-D5, AAV CLv-D6, AAV CLv-D7, AAV CLv-D8, AAV CLv-E1, AAV CLv-K1, AAV CLv-K3, AAV CLv-K6, AAV CLv-L4, AAV CLv-L5, AAV CLv-L6, AAV CLv-M1, AAV CLv-M11, AAV CLv-M2, AAV CLv-M5, AAV CLv-M6, AAV CLv-M7, AAV CLv-M8, AAV CLv-M9, AAV CLv-R1, AAV CLv-R2, AAV CLv-R3, AAV CLv-R4, AAV CLv-R5, AAV CLv-R6, AAV CLv-R7, AAV CLv-R8, AAV CLv-R9, AAV CSp-1, AAV CSp-10, AAV CSp-11, AAV CSp-2, AAV CSp-3, AAV CSp-4, AAV CSp-6, AAV CSp-7, AAV CSp-8, AAV CSp-8.10, AAV CSp-8.2, AAV CSp-8.4, AAV CSp-8.5, AAV CSp-8.6, AAV CSp-8.7, AAV CSp-8.8, AAV CSp-8.9, AAV CSp-9, AAV.hu.48R3, AAV.VR-355, AAV3B, AAV4, AAV5, AAVF1/HSC1, AAVF11/HSC11, AAVF12/HSC12, AAVF13/HSC13, AAVF14/HSC14, AAVF15/HSC15, AAVF16/HSC16, AAVF17/HSC17, AAVF2/HSC2, AAVF3/HSC3, AAVF4/HSC4, AAVF5/HSC5, AAVF6/HSC6, AAVF7/HSC7, AAVF8/HSC8, and/or AAVF9/HSC9 and variants thereof.

[0196] In some embodiments, the AAV serotype may be, or have, a sequence as described in United States Publication No. US20030138772, the contents of which are herein incorporated by reference in their entirety, such as, but not limited to, AAV1 (SEQ ID NO: 6 and 64 of US20030138772), AAV2 (SEQ ID NO: 7 and 70 of US20030138772), AAV3 (SEQ ID NO: 8 and 71 of US20030138772), AAV4 (SEQ ID NO: 63 of US20030138772), AAV5 (SEQ ID NO: 114 of US20030138772), AAV6 (SEQ ID NO: 65 of US20030138772), AAV7 (SEQ ID NO: 1-3 of US20030138772), AAV8 (SEQ ID NO: 4 and 95 of US20030138772), AAV9 (SEQ ID NO: 5 and 100 of US20030138772), AAV10 (SEQ ID NO: 117 of US20030138772), AAV11 (SEQ ID NO: 118 of US20030138772), AAV12 (SEQ ID NO: 119 of US20030138772), AAVrh10 (amino acids 1 to 738 of SEQ ID NO: 81 of US20030138772), AAV16.3 (US20030138772 SEQ ID NO: 10), AAV29.3/bb.1 (US20030138772 SEQ ID NO: 11), AAV29.4 (US20030138772 SEQ ID NO: 12), AAV29.5/bb.2 (US20030138772 SEQ ID NO: 13), AAV1.3 (US20030138772 SEQ ID NO: 14), AAV13.3 (US20030138772 SEQ ID NO: 15), AAV24.1 (US20030138772 SEQ ID NO: 16), AAV27.3 (US20030138772 SEQ ID NO: 17), AAV7.2 (US20030138772 SEQ ID NO: 18), AAVC1 (US20030138772 SEQ ID NO: 19), AAVC3 (US20030138772 SEQ ID NO: 20), AAVC5 (US20030138772 SEQ ID NO: 21), AAVF1 (US20030138772 SEQ ID NO: 22), AAVF3 (US20030138772 SEQ ID NO: 23), AAVF5 (US20030138772 SEQ ID NO: 24), AAVH6 (US20030138772 SEQ ID NO: 25), AAVH2 (US20030138772 SEQ ID NO: 26), AAV42-8 (US20030138772 SEQ ID NO: 27), AAV42-15 (US20030138772 SEQ ID NO: 28), AAV42-5b (US20030138772 SEQ ID NO: 29), AAV42-1b (US20030138772 SEQ ID NO: 30), AAV42-13 (US20030138772 SEQ ID NO: 31), AAV42-3a (US20030138772 SEQ ID NO: 32), AAV42-4 (US20030138772 SEQ ID NO: 33), AAV42-5a (US20030138772 SEQ ID NO: 34), AAV42-10 (US20030138772 SEQ ID NO: 35), AAV42-3b (US20030138772 SEQ ID NO: 36), AAV42-11 (US20030138772 SEQ ID NO: 37), AAV42-6b (US20030138772 SEQ ID NO: 38), AAV43-1 (US20030138772 SEQ ID NO: 39), AAV43-5 (US20030138772 SEQ ID NO: 40), AAV43-12 (US20030138772 SEQ ID NO: 41), AAV43-20 (US20030138772 SEQ ID NO: 42), AAV43-21 (US20030138772 SEQ ID NO: 43), AAV43-23 (US20030138772 SEQ ID NO: 44), AAV43-25 (US20030138772 SEQ ID NO: 45), AAV44.1 (US20030138772 SEQ ID NO: 46), AAV44.5 (US20030138772 SEQ ID NO: 47), AAV223.1 (US20030138772 SEQ ID NO: 48), AAV223.2 (US20030138772 SEQ ID NO: 49), AAV223.4 (US20030138772 SEQ ID NO: 50), AAV223.5 (US20030138772 SEQ ID NO: 51), AAV223.6 (US20030138772 SEQ ID NO: 52). AAV223.7 (US20030138772 SEQ ID NO: 53), AAVA3.4 (US20030138772 SEQ ID NO: 54), AAVA3.5 (US20030138772 SEQ ID NO: 55), AAVA3.7 (US20030138772 SEQ ID NO: 56), AAVA3.3 (US20030138772 SEQ ID NO: 57), AAV42.12 (US20030138772 SEQ ID NO: 58). AAV44.2 (US20030138772 SEQ ID NO: 59), AAV42-2 (US20030138772 SEQ ID NO: 9), or variants thereof.

[0197] In some embodiments, the AAV serotype may be, or have, a sequence as described in United States Publication No. US20150159173, the contents of which are herein incorporated by reference in their entirety, such as, but not limited to, AAV2 (SEQ ID NO: 7 and 23 of US20150159173), rh20 (SEQ ID NO: 1 of US20150159173), rh32/33 (SEQ ID NO: 2 of US20150159173), rh39 (SEQ ID NO: 3, 20 and 36 of US20150159173), rh46 (SEQ ID NO: 4 and 22 of US20150159173), rh73 (SEQ ID NO: 5 of US20150159173), rh74 (SEQ ID NO: 6 of US20150159173), AAV6.1 (SEQ ID NO: 29 of US20150159173), rh.8 (SEQ ID NO: 41 of US20150159173), rh.48.1 (SEQ ID NO: 44 of US20150159173), hu.44 (SEQ ID NO: 45 of US20150159173), hu.29 (SEQ ID NO: 42 of US20150159173), hu.48 (SEQ ID NO: 38 of US20150159173), rh54 (SEQ ID NO: 49 of US20150159173), AAV2 (SEQ ID NO: 7 of US20150159173), cy.5 (SEQ ID NO: 8 and 24 of US20150159173), rh.10 (SEQ ID NO: 9 and 25 of US20150159173), rh.13 (SEQ ID NO: 10 and 26 of US20150159173), AAV1 (SEQ ID NO: 11 and 27 of US20150159173), AAV3 (SEQ ID NO: 12 and 28 of US20150159173), AAV6 (SEQ ID NO: 13 and 29 of US20150159173), AAV7 (SEQ ID NO: 14 and 30 of US20150159173), AAV8 (SEQ ID NO: 15 and 31 of US20150159173), hu.13 (SEQ ID NO: 16 and 32 of US20150159173), hu.26 (SEQ ID NO: 17 and 33 of US20150159173), hu.37 (SEQ ID NO: 18 and 34 of US20150159173), hu.53 (SEQ ID NO: 19 and 35 of US20150159173), rh.43 (SEQ ID NO: 21 and 37 of US20150159173), rh2 (SEQ ID NO: 39 of US20150159173), rh.37 (SEQ ID NO: 40 of US20150159173), rh.64 (SEQ ID NO: 43 of US20150159173), rh.48 (SEQ ID NO: 44 of US20150159173), ch.5 (SEQ ID NO 46 of US20150159173), rh.67 (SEQ ID NO: 47 of US20150159173), rh.58 (SEQ ID NO: 48 of US20150159173), or variants thereof including, but not limited to Cy5R1, Cy5R2, Cy5R3, Cy5R4, rh.13R, rh.37R2, rh.2R, rh.8R, rh.48.1, rh.48.2, rh.48.1.2, hu.44R1, hu.44R2, hu.44R3, hu.29R, ch.5R1, rh64R1, rh64R2, AAV6.2, AAV6.1, AAV6.12, hu.48R1, hu.48R2, and hu.48R3.

[0198] In some embodiments, the AAV serotype may be, or have, a sequence as described in U.S. Pat. No. 7,198,951, the contents of which are herein incorporated by reference in their entirety, such as, but not limited to, AAV9 (SEQ ID NO: 1-3 of U.S. Pat. No. 7,198,951), AAV2 (SEQ ID NO: 4 of U.S. Pat. No. 7,198,951), AAV1 (SEQ ID NO: 5 of U.S. Pat. No. 7,198,951), AAV3 (SEQ ID NO: 6 of U.S. Pat. No. 7,198,951), and AAV8 (SEQ ID NO: 7 of U.S. Pat. No. 7,198,951).

[0199] In some embodiments, the AAV serotype may be, or have, a mutation in the AAV9 sequence as described by N Pulicherla et al. (Molecular Therapy 19(6):1070-1078 (2011), herein incorporated by reference in its entirety), such as but not limited to, AAV9.9. AAV9.11, AAV9.13, AAV9.16, AAV9.24, AAV9.45, AAV9.47, AAV9.61, AAV9.68, AAV9.84.

[0200] In some embodiments, the AAV serotype may be, or have, a sequence as described in U.S. Pat. No. 6,156,303, the contents of which are herein incorporated by reference in their entirety, such as, but not limited to, AAV3B (SEQ ID NO: 1 and 10 of U.S. Pat. No. 6,156,303), AAV6 (SEQ ID NO: 2, 7 and 11 of U.S. Pat. No. 6,156,303), AAV2 (SEQ ID NO: 3 and 8 of U.S. Pat. No. 6,156,303), AAV3A (SEQ ID NO: 4 and 9, of U.S. Pat. No. 6,156,303), or derivatives thereof.

[0201] In some embodiments, the AAV serotype may be, or have, a sequence as described in United States Publication No. US20140359799, the contents of which are herein incorporated by reference in their entirety, such as, but not limited to, AAV8 (SEQ ID NO: 1 of US20140359799), AAVDJ (SEQ ID NO: 2 and 3 of US20140359799), or variants thereof.

[0202] In some embodiments, the serotype may be AAVDJ or a variant thereof, such as AAVDJ8 (or AAV-DJ8), as described by Grimm et al. (Journal of Virology 82(12): 5887-5911 (2008), herein incorporated by reference in its entirety). The amino acid sequence of AAVDJ8 may comprise two or more mutations in order to remove the heparin binding domain (HBD). As a non-limiting example, the AAV-DJ sequence described as SEQ ID NO: 1 in U.S. Pat. No. 7,588,772, the contents of which are herein incorporated by reference in their entirety, may comprise two mutations: (1) R587Q where arginine (R; Arg) at amino acid 587 is changed to glutamine (Q; Gln) and (2) R590T where arginine (R; Arg) at amino acid 590 is changed to threonine (T; Thr). As another non-limiting example, may comprise three mutations: (1) K406R where lysine (K; Lys) at amino acid 406 is changed to arginine (R; Arg), (2) R587Q where arginine (R; Arg) at amino acid 587 is changed to glutamine (Q; Gln) and (3) R590T where arginine (R; Arg) at amino acid 590 is changed to threonine (T; Thr).

[0203] In some embodiments, the AAV serotype may be, or have, a sequence of AAV4 as described in International Publication No. WO1998011244, the contents of which are herein incorporated by reference in their entirety, such as, but not limited to AAV4 (SEQ ID NO: 1-20 of WO1998011244).

[0204] In some embodiments, the AAV serotype may be, or have, a mutation in the AAV2 sequence to generate AAV2G9 as described in International Publication No. WO2014144229 and herein incorporated by reference in its entirety.

[0205] In some embodiments, the AAV serotype may be, or have, a sequence as described in International Publication No. WO2005033321, the contents of which are herein incorporated by reference in their entirety, such as, but not limited to AAV3-3 (SEQ ID NO: 217 of WO2005033321), AAV1 (SEQ ID NO: 219 and 202 of WO2005033321), AAV106.1/hu.37 (SEQ ID No: 10 of WO2005033321), AAV 114.3/hu.40 (SEQ ID No: 11 of WO2005033321), AAV127.2/hu.41 (SEQ ID NO:6 and 8 of WO2005033321), AAV128.3/hu.44 (SEQ ID No: 81 of WO2005033321), AAV130.4/hu.48 (SEQ ID NO: 78 of WO2005033321), AAV145.1/hu.53 (SEQ ID No: 176 and 177 of WO2005033321), AAV145.6/hu.56 (SEQ ID NO: 168 and 192 of WO2005033321), AAV16.12/hu.11 (SEQ ID NO: 153 and 57 of WO2005033321), AAV16.8/hu.10 (SEQ ID NO: 156 and 56 of WO2005033321), AAV161.10/hu.60 (SEQ ID No: 170 of WO2005033321), AAV161.6/hu.61 (SEQ ID No: 174 of WO2005033321), AAV1-7/rh.48 (SEQ ID NO: 32 of WO2005033321), AAV1-8/rh.49 (SEQ ID NOs: 103 and 25 of WO2005033321), AAV2 (SEQ ID NO: 211 and 221 of WO2005033321), AAV2-15/rh.62 (SEQ ID No: 33 and 114 of WO2005033321), AAV2-3/rh.61 (SEQ ID NO: 21 of WO2005033321), AAV2-4/rh.50 (SEQ ID No: 23 and 108 of WO2005033321), AAV2-5/rh.51 (SEQ ID NO: 104 and 22 of WO2005033321), AAV3.1/hu.6 (SEQ ID NO: 5 and 84 of WO2005033321), AAV3.1/hu.9 (SEQ ID NO: 155 and 58 of WO2005033321), AAV3-11/rh.53 (SEQ ID NO: 186 and 176 of WO2005033321), AAV3-3 (SEQ ID NO: 200 of WO2005033321), AAV33.12/hu.17 (SEQ ID NO:4 of WO2005033321), AAV33.4/hu.15 (SEQ ID No: 50 of WO2005033321), AAV33.8/hu.16 (SEQ ID No: 51 of WO2005033321), AAV3-9/rh.52 (SEQ ID NO: 96 and 18 of WO2005033321), AAV4-19/rh.55 (SEQ ID NO: 117 of WO2005033321), AAV4-4 (SEQ ID NO: 201 and 218 of WO2005033321), AAV4-9/rh.54 (SEQ ID NO: 116 of WO2005033321), AAV5 (SEQ ID NO: 199 and 216 of WO2005033321), AAV52.1/hu.20 (SEQ ID NO: 63 of WO2005033321), AAV52/hu.19 (SEQ ID NO: 133 of WO2005033321), AAV5-22/rh.58 (SEQ ID No: 27 of WO2005033321), AAV5-3/rh.57 (SEQ ID NO: 105 of WO2005033321), AAV5-3/rh.57 (SEQ ID No: 26 of WO2005033321), AAV58.2/hu.25 (SEQ ID No: 49 of WO2005033321), AAV6 (SEQ ID NO: 203 and 220 of WO2005033321), AAV7 (SEQ ID NO: 222 and 213 of WO2005033321), AAV7.3/hu.7 (SEQ ID No: 55 of WO2005033321), AAV8 (SEQ ID NO: 223 and 214 of WO2005033321), AAVH-1/hu.1 (SEQ ID No: 46 of WO2005033321), AAVH-5/hu.3 (SEQ ID No: 44 of WO2005033321), AAVhu.1 (SEQ ID NO: 144 of WO2005033321), AAVhu.10 (SEQ ID NO: 156 of WO2005033321), AAVhu.11 (SEQ ID NO: 153 of WO2005033321), AAVhu.12 (WO2005033321 SEQ ID NO: 59), AAVhu.13 (SEQ ID NO: 129 of WO2005033321), AAVhu.14/AAV9 (SEQ ID NO: 123 and 3 of WO2005033321), AAVhu.15 (SEQ ID NO: 147 of WO2005033321), AAVhu.16 (SEQ ID NO: 148 of WO2005033321), AAVhu.17 (SEQ ID NO: 83 of WO2005033321), AAVhu.18 (SEQ ID NO: 149 of WO2005033321), AAVhu.19 (SEQ ID NO: 133 of WO2005033321), AAVhu.2 (SEQ ID NO: 143 of WO2005033321), AAVhu.20 (SEQ ID NO: 134 of WO2005033321), AAVhu.21 (SEQ ID NO: 135 of WO2005033321), AAVhu.22 (SEQ ID NO: 138 of WO2005033321), AAVhu.23.2 (SEQ ID NO: 137 of WO2005033321), AAVhu.24 (SEQ ID NO: 136 of WO2005033321), AAVhu.25 (SEQ ID NO: 146 of WO2005033321), AAVhu.27 (SEQ ID NO: 140 of WO2005033321), AAVhu.29 (SEQ ID NO: 132 of WO2005033321), AAVhu.3 (SEQ ID NO: 145 of WO2005033321), AAVhu.31 (SEQ ID NO: 121 of WO2005033321), AAVhu.32 (SEQ ID NO: 122 of WO2005033321), AAVhu.34 (SEQ ID NO: 125 of WO2005033321), AAVhu.35 (SEQ ID NO: 164 of WO2005033321), AAVhu.37 (SEQ ID NO: 88 of WO2005033321), AAVhu.39 (SEQ ID NO: 102 of WO2005033321), AAVhu.4 (SEQ ID NO: 141 of WO2005033321), AAVhu.40 (SEQ ID NO: 87 of WO2005033321), AAVhu.41 (SEQ ID NO: 91 of WO2005033321), AAVhu.42 (SEQ ID NO: 85 of WO2005033321), AAVhu.43 (SEQ ID NO: 160 of WO2005033321), AAVhu.44 (SEQ ID NO: 144 of WO2005033321), AAVhu.45 (SEQ ID NO: 127 of WO2005033321), AAVhu.46 (SEQ ID NO: 159 of WO2005033321), AAVhu.47 (SEQ ID NO: 128 of WO2005033321), AAVhu.48 (SEQ ID NO: 157 of WO2005033321), AAVhu.49 (SEQ ID NO: 189 of WO2005033321), AAVhu.51 (SEQ ID NO: 190 of WO2005033321), AAVhu.52 (SEQ ID NO: 191 of WO2005033321), AAVhu.53 (SEQ ID NO: 186 of WO2005033321), AAVhu.54 (SEQ ID NO: 188 of WO2005033321), AAVhu.55 (SEQ ID NO: 187 of WO2005033321), AAVhu.56 (SEQ ID NO: 192 of WO2005033321), AAVhu.57 (SEQ ID NO: 193 of WO2005033321), AAVhu.58 (SEQ ID NO: 194 of WO2005033321), AAVhu.6 (SEQ ID NO: 84 of WO2005033321), AAVhu.60 (SEQ ID NO: 184 of WO2005033321), AAVhu.61 (SEQ ID NO: 185 of WO2005033321), AAVhu.63 (SEQ ID NO: 195 of WO2005033321), AAVhu.64 (SEQ ID NO: 1% of WO2005033321), AAVhu.66 (SEQ ID NO: 197 of WO2005033321), AAVhu.67 (SEQ ID NO: 198 of WO2005033321), AAVhu.7 (SEQ ID NO: 150 of WO2005033321), AAVhu.8 (WO2005033321 SEQ ID NO: 12), AAVhu.9 (SEQ ID NO: 155 of WO2005033321), AAVLG-10/rh.40 (SEQ ID No: 14 of WO2005033321), AAVLG4/rh.38 (SEQ ID NO: 86 of WO2005033321), AAVLG-4/rh.38 (SEQ ID No: 7 of WO2005033321), AAVN721-8/rh.43 (SEQ ID NO: 163 of WO2005033321), AAVN721-8/rh.43 (SEQ ID No: 43 of WO2005033321), AAVpi.1 (WO2005033321 SEQ ID NO: 28), AAVpi.2 (WO2005033321 SEQ ID NO: 30), AAVpi.3 (WO2005033321 SEQ ID NO: 29), AAVrh.38 (SEQ ID NO: 86 of WO2005033321), AAVrh.40 (SEQ ID NO: 92 of WO2005033321), AAVrh.43 (SEQ ID NO: 163 of WO2005033321), AAVrh.44 (WO2005033321 SEQ ID NO: 34), AAVrh.45 (WO2005033321 SEQ ID NO: 41), AAVrh.47 (WO2005033321 SEQ ID NO: 38), AAVrh.48 (SEQ ID NO: 115 of WO2005033321), AAVrh.49 (SEQ ID NO: 103 of WO2005033321), AAVrh.50 (SEQ ID NO: 108 of WO2005033321), AAVrh.51 (SEQ ID NO: 104 of WO2005033321), AAVrh.52 (SEQ ID NO: 96 of WO2005033321), AAVrh.53 (SEQ ID NO: 97 of WO2005033321), AAVrh.55 (WO2005033321 SEQ ID NO: 37), AAVrh.56 (SEQ ID NO: 152 of WO2005033321), AAVrh.57 (SEQ ID NO: 105 of WO2005033321), AAVrh.58 (SEQ ID NO: 106 of WO2005033321), AAVrh.59 (WO2005033321 SEQ ID NO: 42), AAVrh.60 (WO2005033321 SEQ ID NO: 31), AAVrh.61 (SEQ ID NO: 107 of WO2005033321), AAVrh.62 (SEQ ID NO: 114 of WO2005033321), AAVrh.64 (SEQ ID NO: 99 of WO2005033321), AAVrh.65 (WO2005033321 SEQ ID NO: 35), AAVrh.68 (WO2005033321 SEQ ID NO: 16), AAVrh.69 (WO2005033321 SEQ ID NO: 39), AAVrh.70 (WO2005033321 SEQ ID NO: 20), AAVrh.72 (WO2005033321 SEQ ID NO: 9), or variants thereof including, but not limited to, AAVcy.2, AAVcy.3, AAVcy.4, AAVcy.5, AAVcy.6, AAVrh.12, AAVrh.17, AAVrh.18, AAVrh.19, AAVrh.21, AAVrh.22, AAVrh.23, AAVrh.24, AAVrh.25, AAVrh.25/42 15, AAVrh.31, AAVrh.32, AAVrh.33, AAVrh.34, AAVrh.35, AAVrh.36, AAVrh.37, AAVrh14. Non limiting examples of variants include SEQ ID NO: 13, 15, 17, 19, 24, 36, 40, 45, 47, 48, 51-54, 60-62, 64-77, 79, 80, 82, 89, 90, 93-95, 98, 100, 101, 109-113, 118-120, 124, 126, 131, 139, 142, 151,154, 158, 161, 162, 165-183, 202, 204-212, 215, 219, 224-236, of WO2005033321, the contents of which are herein incorporated by reference in their entirety.

[0206] In some embodiments, the AAV serotype may be, or have, a sequence as described in International Publication No. WO2015168666, the contents of which are herein incorporated by reference in their entirety, such as, but not limited to, AAVrh8R (SEQ ID NO: 9 of WO2015168666), AAVrh8R A586R mutant (SEQ ID NO: 10 of WO2015168666), AAVrh8R R533A mutant (SEQ ID NO: 11 of WO2015168666), or variants thereof.

[0207] In some embodiments, the AAV serotype may be, or have, a sequence as described in U.S. Pat. No. 9,233,131, the contents of which are herein incorporated by reference in their entirety, such as, but not limited to, AAVhE1.1 (SEQ ID NO:44 of U.S. Pat. No. 9,233,131), AAVhEr1.5 (SEQ ID NO:45 of U.S. Pat. No. 9,233,131), AAVhER1.14 (SEQ ID NO:46 of U.S. Pat. No. 9,233,131), AAVhEr1.8 (SEQ ID NO:47 of U.S. Pat. No. 9,233,131), AAVhEr1.16 (SEQ ID NO:48 of U.S. Pat. No. 9,233,131), AAVhEr1.18 (SEQ ID NO:49 of U.S. Pat. No. 9,233,131), AAVhEr1.35 (SEQ ID NO:50 of U.S. Pat. No. 9,233,131), AAVhEr1.7 (SEQ ID NO:51 of U.S. Pat. No. 9,233,131), AAVhEr1.36 (SEQ ID NO:52 of U.S. Pat. No. 9,233,131), AAVhEr2.29 (SEQ ID NO:53 of U.S. Pat. No. 9,233,131), AAVhEr2.4 (SEQ ID NO:54 of U.S. Pat. No. 9,233,131), AAVhEr2.16 (SEQ ID NO:55 of U.S. Pat. No. 9,233,131), AAVhEr2.30 (SEQ ID NO:56 of U.S. Pat. No. 9,233,131), AAVhEr2.31 (SEQ ID NO:58 of U.S. Pat. No. 9,233,131), AAVhEr2.36 (SEQ ID NO:57 of U.S. Pat. No. 9,233,131), AAVhER1.23 (SEQ ID NO:53 of U.S. Pat. No. 9,233,131), AAVhEr3.1 (SEQ ID NO:59 of U.S. Pat. No. 9,233,131), AAV2.5T (SEQ ID NO:42 of U.S. Pat. No. 9,233,131), or variants thereof.

[0208] In some embodiments, the AAV serotype may be, or have, a sequence as described in United States Patent Publication No. US20150376607, the contents of which are herein incorporated by reference in their entirety, such as, but not limited to, AAV-PAEC (SEQ ID NO:1 of US20150376607), AAV-LK01 (SEQ ID NO:2 of US20150376607), AAV-LK02 (SEQ ID NO:3 of US20150376607), AAV-LK03 (SEQ ID NO:4 of US20150376607), AAV-LK04 (SEQ ID NO:5 of US20150376607), AAV-LK05 (SEQ ID NO:6 of US20150376607), AAV-LK06 (SEQ ID NO:7 of US20150376607), AAV-LK07 (SEQ ID NO:8 of US20150376607), AAV-LK08 (SEQ ID NO:9 of US20150376607), AAV-LK09 (SEQ ID NO:10 of US20150376607), AAV-LK10 (SEQ ID NO:11 of US20150376607), AAV-LK11 (SEQ ID NO:12 of US20150376607), AAV-LK12 (SEQ ID NO:13 of US20150376607), AAV-LK13 (SEQ ID NO:14 of US20150376607), AAV-LK14 (SEQ ID NO:15 of US20150376607), AAV-LK15 (SEQ ID NO:16 of US20150376607), AAV-LK16 (SEQ ID NO:17 of US20150376607), AAV-LK17 (SEQ ID NO:18 of US20150376607), AAV-LK18 (SEQ ID NO:19 of US20150376607), AAV-LK19 (SEQ ID NO:20 of US20150376607), AAV-PAEC2 (SEQ ID NO:21 of US20150376607), AAV-PAEC4 (SEQ ID NO:22 of US20150376607), AAV-PAEC6 (SEQ ID NO:23 of US20150376607), AAV-PAEC7 (SEQ ID NO:24 of US20150376607), AAV-PAEC8 (SEQ ID NO:25 of US20150376607), AAV-PAEC11 (SEQ ID NO:26 of US20150376607), AAV-PAEC12 (SEQ ID NO:27, of US20150376607), or variants thereof.

[0209] In some embodiments, the AAV serotype may be, or have, a sequence as described in U.S. Pat. No. 9,163,261, the contents of which are herein incorporated by reference in their entirety, such as, but not limited to, AAV-2-pre-miRNA-101 (SEQ ID NO: 1 U.S. Pat. No. 9,163,261), or variants thereof.

[0210] In some embodiments, the AAV serotype may be, or have, a sequence as described in United States Patent Publication No. US20150376240, the contents of which are herein incorporated by reference in their entirety, such as, but not limited to, AAV-8h (SEQ ID NO: 6 of US20150376240), AAV-8b (SEQ ID NO: 5 of US20150376240), AAV-h (SEQ ID NO: 2 of US20150376240), AAV-b (SEQ ID NO: 1 of US20150376240), or variants thereof.

[0211] In some embodiments, the AAV serotype may be, or have, a sequence as described in United States Patent Publication No. US20160017295, the contents of which are herein incorporated by reference in their entirety, such as, but not limited to, AAV SM 10-2 (SEQ ID NO: 22 of US20160017295), AAV Shuffle 100-1 (SEQ ID NO: 23 of US20160017295), AAV Shuffle 100-3 (SEQ ID NO: 24 of US20160017295), AAV Shuffle 100-7 (SEQ ID NO: 25 of US20160017295), AAV Shuffle 10-2 (SEQ ID NO: 34 of US20160017295), AAV Shuffle 10-6 (SEQ ID NO: 35 of US20160017295), AAV Shuffle 10-8 (SEQ ID NO: 36 of US20160017295). AAV Shuffle 100-2 (SEQ ID NO: 37 of US20160017295), AAV SM 10-1 (SEQ ID NO: 38 of US20160017295), AAV SM 10-8 (SEQ ID NO: 39 of US20160017295), AAV SM 100-3 (SEQ ID NO: 40 of US20160017295), AAV SM 100-10 (SEQ ID NO: 41 of US20160017295), or variants thereof.

[0212] In some embodiments, the AAV serotype may be, or have, a sequence as described in United States Patent Publication No. US20150238550, the contents of which are herein incorporated by reference in their entirety, such as, but not limited to, BNP61 AAV (SEQ ID NO: 1 of US20150238550), BNP62 AAV (SEQ ID NO: 3 of US20150238550), BNP63 AAV (SEQ ID NO: 4 of US20150238550), or variants thereof.

[0213] In some embodiments, the AAV serotype may be or may have a sequence as described in United States Patent Publication No. US20150315612, the contents of which are herein incorporated by reference in their entirety, such as, but not limited to, AAVrh.50 (SEQ ID NO: 108 of US20150315612), AAVrh.43 (SEQ ID NO: 163 of US20150315612), AAVrh.62 (SEQ ID NO: 114 of US20150315612), AAVrh.48 (SEQ ID NO: 115 of US20150315612), AAVhu.19 (SEQ ID NO: 133 of US20150315612), AAVhu.11 (SEQ ID NO: 153 of US20150315612), AAVhu.53 (SEQ ID NO: 186 of US20150315612), AAV4-8/rh.64 (SEQ ID No: 15 of US20150315612), AAVLG-9/hu.39 (SEQ ID No: 24 of US20150315612), AAV54.5/hu.23 (SEQ ID No: 60 of US20150315612), AAV54.2/hu.22 (SEQ ID No: 67 of US20150315612), AAV54.7/hu.24 (SEQ ID No: 66 of US20150315612), AAV54.1/hu.21 (SEQ ID No: 65 of US20150315612), AAV54.4R/hu.27 (SEQ ID No: 64 of US20150315612), AAV46.2/hu.28 (SEQ ID No: 68 of US20150315612), AAV46.6/hu.29 (SEQ ID No: 69 of US20150315612). AAV128.1/hu.43 (SEQ ID No: 80 of US20150315612), or variants thereof.

[0214] In some embodiments, the AAV serotype may be, or have, a sequence as described in International Publication No. WO2015121501, the contents of which are herein incorporated by reference in their entirety, such as, but not limited to, true type AAV (ttAAV) (SEQ ID NO: 2 of WO2015121501), “UPenn AAV10” (SEQ ID NO: 8 of WO2015121501), “Japanese AAV10” (SEQ ID NO: 9 of WO2015121501), or variants thereof.

[0215] According to the present disclosure. AAV capsid serotype selection or use may be from a variety of species. In some embodiments, the AAV may be an avian AAV (AAAV). The AAAV serotype may be, or have, a sequence as described in U.S. Pat. No. 9,238,800, the contents of which are herein incorporated by reference in their entirety, such as, but not limited to, AAAV (SEQ ID NO: 1, 2, 4, 6, 8, 10, 12, and 14 of U.S. Pat. No. 9,238,800), or variants thereof.

[0216] In some embodiments, the AAV may be a bovine AAV (BAAV). The BAAV serotype may be, or have, a sequence as described in U.S. Pat. No. 9,193,769, the contents of which are herein incorporated by reference in their entirety, such as, but not limited to, BAAV (SEQ ID NO: 1 and 6 of U.S. Pat. No. 9,193,769), or variants thereof. The BAAV serotype may be or have a sequence as described in U.S. Pat. No. 7,427,396, the contents of which are herein incorporated by reference in their entirety, such as, but not limited to, BAAV (SEQ ID NO: 5 and 6 of U.S. Pat. No. 7,427,396), or variants thereof.

[0217] In some embodiments, the AAV may be a caprine AAV. The caprine AAV serotype may be, or have, a sequence as described in U.S. Pat. No. 7,427,396, the contents of which are herein incorporated by reference in their entirety, such as, but not limited to, caprine AAV (SEQ ID NO: 3 of U.S. Pat. No. 7,427,396), or variants thereof.

[0218] In other embodiments the AAV may be engineered as a hybrid AAV from two or more parental serotypes. In some embodiments, the AAV may be AAV2G9 which comprises sequences from AAV2 and AAV9. The AAV2G9 AAV serotype may be, or have, a sequence as described in United States Patent Publication No. US20160017005, the contents of which are herein incorporated by reference in its entirety.

[0219] In some embodiments, the AAV may be a serotype generated by the AAV9 capsid library with mutations in amino acids 390-627 (VP1 numbering) as described by Pulicherla et al. (Molecular Therapy 19(6):1070-1078 (2011), the contents of which are herein incorporated by reference in their entirety. The serotype and corresponding nucleotide and amino acid substitutions may be, but is not limited to, AAV9.1 (G1594C; D532H). AAV6.2 (T1418A and T1436X; V473D and 1479K), AAV9.3 (T1238A; F413Y), AAV9.4 (T1250C and A1617T; F417S), AAV9.5 (A1235G, A1314T, A1642G, C1760T; Q412R, T548A, A587V), AAV9.6 (T1231A; F411I), AAV9.9 (G1203A, G1785T; W595C), AAV9.10 (A1500G. T1676C; M559T), AAV9.11 (A1425T, A1702C, A1769T; T568P, Q590L), AAV9.13 (A1369C, A1720T: N457H, T574S), AAV9.14 (T1340A, T1362C, T1560C, G1713A; L447H), AAV9.16 (A1775T: Q592L), AAV9.24 (T1507C, T1521G; W503R), AAV9.26 (A1337G, A1769C; Y446C, Q590P), AAV9.33 (A1667C; D556A), AAV9.34 (A1534G, C1794T; N512D), AAV9.35 (A1289T, T1450A, C1494T, A1515T, C1794A, G1816A; Q430L, Y484N, N98K, V6061), AAV9.40 (A1694T. E565V), AAV9.41 (A1348T, T1362C; T450S), AAV9.44 (A1684C, A1701T, A1737G; N562H, K567N), AAV9.45 (A1492T, C1804T; N498Y, L602F), AAV9.46 (G1441C, T1525C, T1549G; G481R, W509R, L517V), 9.47 (G1241A, G1358A, A1669G, C1745T; S414N, G453D, K557E, T5821), AAV9.48 (C1445T, A1736T; P482L, Q579L), AAV9.50 (A1638T, C1683T, T1805A; Q546H, L602H), AAV9.53 (G1301A, A1405C, C1664T, G1811T; R134Q, S469R, A555V, G604V), AAV9.54 (C1531A, T1609A; L5111, L537M), AAV9.55 (T1605A; F535L), AAV9.58 (C1475T, C1579A; T4921, H527N), AAV.59 (T1336C; Y446H), AAV9.61 (A1493T; N4981), AAV9.64 (C1531A, A1617T; L5111), AAV9.65 (C1335T, T1530C, C1568A; A523D), AAV9.68 (C1510A; P504T), AAV9.80 (G1441A; G481R), AAV9.83 (C1402A, A1500T; P468T, E500D), AAV9.87 (T1464C, T1468C; S490P), AAV9.90 (A1196T; Y399F), AAV9.91 (T1316G, A1583T, C1782G, T1806C; L439R, K5281), AAV9.93 (A1273G, A1421G, A1638C, C1712T, G1732A, A1744T, A1832T; S425G, Q474R, Q546H, P571L, G578R. T582S, D611V), AAV9.94 (A1675T; M559L) and AAV9.95 (T1605A; F535L).

[0220] In some embodiments, the AAV serotype may be, or have, a sequence as described in International Publication No. WO2016049230, the contents of which are herein incorporated by reference in their entirety, such as, but not limited to AAVF1/HSC1 (SEQ ID NO: 2 and 20 of WO2016049230), AAVF2/HSC2 (SEQ ID NO: 3 and 21 of WO2016049230), AAVF3/HSC3 (SEQ ID NO: 5 and 22 of WO2016049230), AAVF4/HSC4 (SEQ ID NO: 6 and 23 of WO2016049230), AAVF5/HSC5 (SEQ ID NO: 11 and 25 of WO2016049230), AAVF6/HSC6 (SEQ ID NO: 7 and 24 of WO2016049230), AAVF7/HSC7 (SEQ ID NO: 8 and 27 of WO2016049230), AAVF8/HSC8 (SEQ ID NO: 9 and 28 of WO2016049230), AAVF9/HSC9 (SEQ ID NO: 10 and 29 of WO2016049230), AAVF11/HSC11 (SEQ ID NO: 4 and 26 of WO2016049230), AAVF12/HSC12 (SEQ ID NO: 12 and 30 of WO2016049230), AAVF13/HSC13 (SEQ ID NO: 14 and 31 of WO2016049230), AAVF14/HSC14 (SEQ ID NO: 15 and 32 of WO2016049230), AAVF15/HSC15 (SEQ ID NO: 16 and 33 of WO2016049230), AAVF16/HSC16 (SEQ ID NO: 17 and 34 of WO2016049230), AAVF17/HSC17 (SEQ ID NO: 13 and 35 of WO2016049230), or variants or derivatives thereof.

[0221] In some embodiments, the AAV serotype may be, or have, a sequence as described in U.S. Pat. No. 8,734,809, the contents of which are herein incorporated by reference in their entirety, such as, but not limited to, AAV CBr-E1 (SEQ ID NO: 13 and 87 of U.S. Pat. No. 8,734,809), AAV CBr-E2 (SEQ ID NO: 14 and 88 of U.S. Pat. No. 8,734,809), AAV CBr-E3 (SEQ ID NO: 15 and 89 of U.S. Pat. No. 8,734,809), AAV CBr-E4 (SEQ ID NO: 16 and 90 of U.S. Pat. No. 8,734,809), AAV CBr-E5 (SEQ ID NO: 17 and 91 of U.S. Pat. No. 8,734,809), AAV CBr-c5 (SEQ ID NO: 18 and 92 of U.S. Pat. No. 8,734,809), AAV CBr-E6 (SEQ ID NO: 19 and 93 of U.S. Pat. No. 8,734,809), AAV CBr-E7 (SEQ ID NO: 20 and 94 of U.S. Pat. No. 8,734,809), AAV CBr-E8 (SEQ ID NO: 21 and 95 of U.S. Pat. No. 8,734,809), AAV CLv-D1 (SEQ ID NO: 22 and 96 of U.S. Pat. No. 8,734,809), AAV CLv-D2 (SEQ ID NO: 23 and 97 of U.S. Pat. No. 8,734,809), AAV CLv-D3 (SEQ ID NO: 24 and 98 of U.S. Pat. No. 8,734,809), AAV CLv-D4 (SEQ ID NO: 25 and 99 of U.S. Pat. No. 8,734,809), AAV CLv-D5 (SEQ ID NO: 26 and 100 of U.S. Pat. No. 8,734,809), AAV CLv-D6 (SEQ ID NO: 27 and 101 of U.S. Pat. No. 8,734,809), AAV CLv-D7 (SEQ ID NO: 28 and 102 of U.S. Pat. No. 8,734,809), AAV CLv-D8 (SEQ ID NO: 29 and 103 of U.S. Pat. No. 8,734,809), AAV CLv-E1 (SEQ ID NO: 13 and 87 of U.S. Pat. No. 8,734,809), AAV CLv-R1 (SEQ ID NO: 30 and 104 of U.S. Pat. No. 8,734,809), AAV CLv-R2 (SEQ ID NO: 31 and 105 of U.S. Pat. No. 8,734,809), AAV CLv-R3 (SEQ ID NO: 32 and 106 of U.S. Pat. No. 8,734,809), AAV CLv-R4 (SEQ ID NO: 33 and 107 of U.S. Pat. No. 8,734,809), AAV CLv-R5 (SEQ ID NO: 34 and 108 of U.S. Pat. No. 8,734,809), AAV CLv-R6 (SEQ ID NO: 35 and 109 of U.S. Pat. No. 8,734,809), AAV CLv-R7 (SEQ ID NO: 36 and 110 of U.S. Pat. No. 8,734,809), AAV CLv-R8 (SEQ ID NO: X and X of U.S. Pat. No. 8,734,809), AAV CLv-R9 (SEQ ID NO: X and X of US8734809), AAV CLg-F1 (SEQ ID NO: 39 and 113 of U.S. Pat. No. 8,734,809), AAV CLg-F2 (SEQ ID NO: 40 and 114 of U.S. Pat. No. 8,734,809), AAV CLg-F3 (SEQ ID NO: 41 and 115 of U.S. Pat. No. 8,734,809), AAV CLg-F4 (SEQ ID NO: 42 and 116 of U.S. Pat. No. 8,734,809), AAV CLg-F5 (SEQ ID NO: 43 and 117 of U.S. Pat. No. 8,734,809), AAV CLg-F6 (SEQ ID NO: 43 and 117 of U.S. Pat. No. 8,734,809), AAV CLg-F7 (SEQ ID NO: 44 and 118 of U.S. Pat. No. 8,734,809), AAV CLg-F8 (SEQ ID NO: 43 and 117 of U.S. Pat. No. 8,734,809), AAV CSp-1 (SEQ ID NO: 45 and 119 of U.S. Pat. No. 8,734,809), AAV CSp-10 (SEQ ID NO: 46 and 120 of U.S. Pat. No. 8,734,809), AAV CSp-11 (SEQ ID NO: 47 and 121 of U.S. Pat. No. 8,734,809), AAV CSp-2 (SEQ ID NO: 48 and 122 of U.S. Pat. No. 8,734,809), AAV CSp-3 (SEQ ID NO: 49 and 123 of U.S. Pat. No. 8,734,809), AAV CSp-4 (SEQ ID NO: 50 and 124 of U.S. Pat. No. 8,734,809), AAV CSp-6 (SEQ ID NO: 51 and 125 of U.S. Pat. No. 8,734,809), AAV CSp-7 (SEQ ID NO: 52 and 126 of U.S. Pat. No. 8,734,809), AAV CSp-8 (SEQ ID NO: 53 and 127 of U.S. Pat. No. 8,734,809), AAV CSp-9 (SEQ ID NO: 54 and 128 of U.S. Pat. No. 8,734,809), AAV CHt-2 (SEQ ID NO: 55 and 129 of U.S. Pat. No. 8,734,809), AAV CHt-3 (SEQ ID NO: 56 and 130 of U.S. Pat. No. 8,734,809), AAV CKd-1 (SEQ ID NO: 57 and 131 of U.S. Pat. No. 8,734,809), AAV CKd-10 (SEQ ID NO: 58 and 132 of U.S. Pat. No. 8,734,809), AAV CKd-2 (SEQ ID NO: 59 and 133 of U.S. Pat. No. 8,734,809), AAV CKd-3 (SEQ ID NO: 60 and 134 of U.S. Pat. No. 8,734,809), AAV CKd-4 (SEQ ID NO: 61 and 135 of U.S. Pat. No. 8,734,809), AAV CKd-6 (SEQ ID NO: 62 and 136 of U.S. Pat. No. 8,734,809), AAV CKd-7 (SEQ ID NO: 63 and 137 of U.S. Pat. No. 8,734,809), AAV CKd-8 (SEQ ID NO: 64 and 138 of U.S. Pat. No. 8,734,809), AAV CLv-1 (SEQ ID NO: 35 and 139 of U.S. Pat. No. 8,734,809), AAV CLv-12 (SEQ ID NO: 66 and 140 of U.S. Pat. No. 8,734,809), AAV CLv-13 (SEQ ID NO: 67 and 141 of U.S. Pat. No. 8,734,809), AAV CLv-2 (SEQ ID NO: 68 and 142 of U.S. Pat. No. 8,734,809), AAV CLv-3 (SEQ ID NO: 69 and 143 of U.S. Pat. No. 8,734,809), AAV CLv-4 (SEQ ID NO: 70 and 144 of U.S. Pat. No. 8,734,809), AAV CLv-6 (SEQ ID NO: 71 and 145 of U.S. Pat. No. 8,734,809), AAV CLv-8 (SEQ ID NO: 72 and 146 of U.S. Pat. No. 8,734,809), AAV CKd-B1 (SEQ ID NO: 73 and 147 of U.S. Pat. No. 8,734,809), AAV CKd-B2 (SEQ ID NO: 74 and 148 of U.S. Pat. No. 8,734,809), AAV CKd-B3 (SEQ ID NO: 75 and 149 of U.S. Pat. No. 8,734,809), AAV CKd-B4 (SEQ ID NO: 76 and 150 of U.S. Pat. No. 8,734,809), AAV CKd-B5 (SEQ ID NO: 77 and 151 of U.S. Pat. No. 8,734,809), AAV CKd-B6 (SEQ ID NO: 78 and 152 of U.S. Pat. No. 8,734,809), AAV CKd-B7 (SEQ ID NO: 79 and 153 of U.S. Pat. No. 8,734,809), AAV CKd-B8 (SEQ ID NO: 80 and 154 of U.S. Pat. No. 8,734,809), AAV CKd-H1 (SEQ ID NO: 81 and 155 of U.S. Pat. No. 8,734,809), AAV CKd-H2 (SEQ ID NO: 82 and 156 of U.S. Pat. No. 8,734,809), AAV CKd-H3 (SEQ ID NO: 83 and 157 of U.S. Pat. No. 8,734,809), AAV CKd-H4 (SEQ ID NO: 84 and 158 of U.S. Pat. No. 8,734,809), AAV CKd-H5 (SEQ ID NO: 85 and 159 of U.S. Pat. No. 8,734,809), AAV CKd-H6 (SEQ ID NO: 77 and 151 of U.S. Pat. No. 8,734,809), AAV CHt-1 (SEQ ID NO: 86 and 160 of U.S. Pat. No. 8,734,809), AAV CLv1-1 (SEQ ID NO: 171 of U.S. Pat. No. 8,734,809), AAV CLv1-2 (SEQ ID NO: 172 of U.S. Pat. No. 8,734,809), AAV CLv1-3 (SEQ ID NO: 173 of U.S. Pat. No. 8,734,809), AAV CLv1-4 (SEQ ID NO: 174 of U.S. Pat. No. 8,734,809), AAV Clv1-7 (SEQ ID NO: 175 of US8734809), AAV Clv1-8 (SEQ ID NO: 176 of U.S. Pat. No. 8,734,809), AAV Clv1-9 (SEQ ID NO: 177 of U.S. Pat. No. 8,734,809), AAV Clv1-10 (SEQ ID NO: 178 of U.S. Pat. No. 8,734,809), AAV.VR-355 (SEQ ID NO: 181 of U.S. Pat. No. 8,734,809), AAV.hu.48R3 (SEQ ID NO: 183 of U.S. Pat. No. 8,734,809), or variants or derivatives thereof.

[0222] In some embodiments, the AAV serotype may be, or have, a sequence as described in International Publication No. WO2016065001, the contents of which are herein incorporated by reference in their entirety, such as, but not limited to AAV CHt-P2 (SEQ ID NO: 1 and 51 of WO2016065001), AAV CHt-P5 (SEQ ID NO: 2 and 52 of WO2016065001), AAV CHt-P9 (SEQ ID NO: 3 and 53 of WO2016065001), AAV CBr-7.1 (SEQ ID NO: 4 and 54 of WO2016065001), AAV CBr-7.2 (SEQ ID NO: 5 and 55 of WO2016065001), AAV CBr-7.3 (SEQ ID NO: 6 and 56 of WO2016065001), AAV CBr-7.4 (SEQ ID NO: 7 and 57 of WO2016065001), AAV CBr-7.5 (SEQ ID NO: 8 and 58 of WO2016065001), AAV CBr-7.7 (SEQ ID NO: 9 and 59 of WO2016065001), AAV CBr-7.8 (SEQ ID NO: 10 and 60 of WO2016065001), AAV CBr-7.10 (SEQ ID NO: 11 and 61 of WO2016065001), AAV CKd-N3 (SEQ ID NO: 12 and 62 of WO2016065001), AAV CKd-N4 (SEQ ID NO: 13 and 63 of WO2016065001), AAV CKd-N9 (SEQ ID NO: 14 and 64 of WO2016065001), AAV CLv-L4 (SEQ ID NO: 15 and 65 of WO2016065001), AAV CLv-L5 (SEQ ID NO: 16 and 66 of WO2016065001), AAV CLv-L6 (SEQ ID NO: 17 and 67 of WO2016065001), AAV CLv-K1 (SEQ ID NO: 18 and 68 of WO2016065001), AAV CLv-K3 (SEQ ID NO: 19 and 69 of WO2016065001), AAV CLv-K6 (SEQ ID NO: 20 and 70 of WO2016065001), AAV CLv-M1 (SEQ ID NO: 21 and 71 of WO2016065001), AAV CLv-M11 (SEQ ID NO: 22 and 72 of WO2016065001), AAV CLv-M2 (SEQ ID NO: 23 and 73 of WO2016065001), AAV CLv-M5 (SEQ ID NO: 24 and 74 of WO2016065001), AAV CLv-M6 (SEQ ID NO: 25 and 75 of WO2016065001), AAV CLv-M7 (SEQ ID NO: 26 and 76 of WO2016065001), AAV CLv-M8 (SEQ ID NO: 27 and 77 of WO2016065001), AAV CLv-M9 (SEQ ID NO: 28 and 78 of WO2016065001), AAV CHt-P1 (SEQ ID NO: 29 and 79 of WO2016065001), AAV CHt-P6 (SEQ ID NO: 30 and 80 of WO2016065001), AAV CHt-P8 (SEQ ID NO: 31 and 81 of WO2016065001), AAV CHt-6.1 (SEQ ID NO: 32 and 82 of WO2016065001), AAV CHt-6.10 (SEQ ID NO: 33 and 83 of WO2016065001), AAV CHt-6.5 (SEQ ID NO: 34 and 84 of WO2016065001), AAV CHt-6.6 (SEQ ID NO: 35 and 85 of WO2016065001), AAV CHt-6.7 (SEQ ID NO: 36 and 86 of WO2016065001), AAV CHt-6.8 (SEQ ID NO: 37 and 87 of WO2016065001), AAV CSp-8.10 (SEQ ID NO: 38 and 88 of WO2016065001), AAV CSp-8.2 (SEQ ID NO: 39 and 89 of WO2016065001), AAV CSp-8.4 (SEQ ID NO: 40 and 90 of WO2016065001), AAV CSp-8.5 (SEQ ID NO: 41 and 91 of WO2016065001), AAV CSp-8.6 (SEQ ID NO: 42 and 92 of WO2016065001), AAV CSp-8.7 (SEQ ID NO: 43 and 93 of WO2016065001), AAV CSp-8.8 (SEQ ID NO: 44 and 94 of WO2016065001), AAV CSp-8.9 (SEQ ID NO: 45 and 95 of WO2016065001), AAV CBr-B7.3 (SEQ ID NO: 46 and 96 of WO2016065001), AAV CBr-B7.4 (SEQ ID NO: 47 and 97 of WO2016065001), AAV3B (SEQ ID NO: 48 and 98 of WO2016065001), AAV4 (SEQ ID NO: 49 and 99 of WO2016065001), AAV5 (SEQ ID NO: 50 and 100 of WO2016065001), or variants or derivatives thereof.

[0223] In some embodiments, the AAV particle and/or VAP may have, or may be a serotype selected from any of those found in Table 1.

[0224] In some embodiments, the AAV capsid may comprise a sequence, fragment or variant thereof, of any of the sequences in Table 1.

[0225] In some embodiments, the AAV capsid may be encoded by a sequence, fragment or variant as described in Table 1.

[0226] In any of the DNA and RNA sequences referenced and/or described herein, the single letter symbol has the following description: A for adenine; C for cytosine; G for guanine; T for thymine; U for Uracil; W for weak bases such as adenine or thymine; S for strong nucleotides such as cytosine and guanine; M for amino nucleotides such as adenine and cytosine; K for keto nucleotides such as guanine and thymine; R for purines adenine and guanine; Y for pyrimidine cytosine and thymine, B for any base that is not A (e.g., cytosine, guanine, and thy-mine); D for any base that is not C (e.g., adenine, guanine and thymine): H for any base that is not G (e.g., adenine, cytosine, and thymine); V for any base that is not T (e.g., adenine, cytosine, and guanine); N for any nucleotide (which is not a gap); and Z is for zero.

[0227] In any of the amino acid sequences referenced and/or described herein, the single letter symbol has the following description: G (Gly) for Glycine; A (Ala) for Alanine: L (Leu) for Leucine; M (Met) for Methionine; F (Phe) for Phenylalanine, W (Trp) for Tryptophan: K (Lys) for Lysine; Q (Gin) for Glutamine; E (Glu) for Glutamic Acid, S (Ser) for Serine; P (Pro) for Proline; V (Val) for Valine I (Ile) for Isoleucine C (Cys) for Cysteine; Y (Tyr) for Tyrosine H (His) for Histidine: R (Arg) for Arginine N (Asn) for Asparagine: D (Asp) for Aspartic Acid: T (Thr) for Threonine; B (Asx) for Aspartic acid or Asparagine; J (Xle) for Leucine or Isoleucine; O (Pyl) for Pyrrolysine; U (Sec) for Selenocysteine; X (Xaa) for any amino acid, and Z (Glx) for Glutamine or Glutamic acid.

TABLE 1
AAV Serotypes

| Serotype | SEQ ID NO: | Reference Information |
|---|---|---|
| VOY101 | 1 | — |
| VOY101 | 2 | — |
| VOY201 | 3 | — |
| PHP.N/PHP.B-DGT | 4 | WO2017100671 SEQ ID NO: 46 |
| AAVPHP.B or G2B-26 | 5 | WO2015038958 SEQ ID NO: 8 and 13 |
| AAVPHP.B | 6 | WO2015038958 SEQ ID NO: 9 |
| AAVG2B-13 | 7 | WO2015038958 SEQ ID NO: 12 |
| AAVTH1.1-32 | 8 | WO2015038958 SEQ ID NO: 14 |
| AAVTH1.1-35 | 9 | WO2015038958 SEQ ID NO: 15 |
| PHP.S/G2A12 | 10 | WO2017100671 SEQ ID NO: 47 |
| AAV9/hu.14 K449R | 11 | WO2017100671 SEQ ID NO: 45 |
| AAV1 | 12 | US20150159173 SEQ ID NO: 11, |
| | | US20150315612 SEQ ID NO: 202 |
| AAV1 | 13 | US20160017295 SEQ ID NO: 1, |
| | | US20030138772 SEQ ID NO: 64, |
| | | US20150159173 SEQ ID NO: 27, |
| | | US20150315612 SEQ ID NO: 219, |
| | | U.S. Pat. No. 7,198,951 SEQ ID NO: 5 |
| AAV1 | 14 | US20030138772 SEQ ID NO: 6 |
| AAV1.3 | 15 | US20030138772 SEQ ID NO: 14 |
| AAV10 | 16 | US20030138772 SEQ ID NO: 117 |
| AAV10 | 17 | WO2015121501 SEQ ID NO: 9 |
| AAV10 | 18 | WO2015121501 SEQ ID NO: 8 |
| AAV11 | 19 | US20030138772 SEQ ID NO: 118 |
| AAV12 | 20 | US20030138772 SEQ ID NO: 119 |
| AAV2 | 21 | US20150159173 SEQ ID NO: 7, |
| | | US20150315612 SEQ ID NO: 211 |
| AAV2 | 22 | US20030138772 SEQ ID NO: 70, |
| | | US20150159173 SEQ ID NO: 23, |
| | | US20150315612 SEQ ID NO: 221, US20160017295 |
| | | SEQ ID NO: 2, U.S. Pat. No. 6,156,303 |
| | | SEQ ID NO: 4, U.S. Pat. No. 7,198,951 |
| | | SEQ ID NO: 4, WO2015121501 SEQ ID NO: 1 |
| AAV2 | 23 | U.S. Pat. No. 6,156,303 SEQ ID NO: 8 |
| AAV2 | 24 | US20030138772 SEQ ID NO: 7 |
| AAV2 | 25 | U.S. Pat. No. 6,156,303 SEQ ID NO: 3 |
| AAV2.5T | 26 | U.S. Pat. No. 9,233,131 SEQ ID NO: 42 |
| AAV223.10 | 27 | US20030138772 SEQ ID NO: 75 |
| AAV223.2 | 28 | US20030138772 SEQ ID NO: 49 |
| AAV223.2 | 29 | US20030138772 SEQ ID NO: 76 |
| AAV223.4 | 30 | US20030138772 SEQ ID NO: 50 |
| AAV223.4 | 31 | US20030138772 SEQ ID NO: 73 |
| AAV223.5 | 32 | US20030138772 SEQ ID NO: 51 |
| AAV223.5 | 33 | US20030138772 SEQ ID NO: 74 |
| AAV223.6 | 34 | US20030138772 SEQ ID NO: 52 |
| AAV223.6 | 35 | US20030138772 SEQ ID NO: 78 |
| AAV223.7 | 36 | US20030138772 SEQ ID NO: 53 |
| AAV223.7 | 37 | US20030138772 SEQ ID NO: 77 |
| AAV29.3 | 38 | US20030138772 SEQ ID NO: 82 |
| AAV29.4 | 39 | US20030138772 SEQ ID NO: 12 |
| AAV29.5 | 40 | US20030138772 SEQ ID NO: 83 |
| AAV29.5 (AAVbb.2) | 41 | US20030138772 SEQ ID NO: 13 |
| AAV3 | 42 | US20150159173 SEQ ID NO: 12 |
| AAV3 | 43 | US20030138772 SEQ ID NO: 71, |
| | | US20150159173 SEQ ID NO: 28, |
| | | US20160017295 SEQ ID NO: 3, |
| | | U.S. Pat. No. 7,198,951 SEQ ID NO. 6 |
| AAV3 | 44 | US20030138772 SEQ ID NO: 8 |
| AAV3.3b | 45 | US20030138772 SEQ ID NO: 72 |
| AAV3-3 | 46 | US20150315612 SEQ ID NO: 200 |
| AAV3-3 | 47 | US20150315612 SEQ ID NO: 217 |
| AAV3a | 48 | U.S. Pat. No. 6,156,303 SEQ ID NO: 5 |
| AAV3a | 49 | U.S. Pat. No. 6,156,303 SEQ ID NO: 9 |
| AAV3b | 50 | U.S. Pat. No. 6,156,303 SEQ ID NO: 6 |
| AAV3b | 51 | U.S. Pat. No. 6,156,303 SEQ ID NO: 10 |
| AAV3b | 52 | U.S. Pat. No. 6,156,303 SEQ ID NO: 1 |
| AAV4 | 53 | US20140348794 SEQ ID NO: 17 |
| AAV4 | 54 | US20140348794 SEQ ID NO: 5 |
| AAV4 | 55 | US20140348794 SEQ ID NO: 3 |
| AAV4 | 56 | US20140348794 SEQ ID NO: 14 |
| AAV4 | 57 | US20140348794 SEQ ID NO: 15 |
| AAV4 | 58 | US20140348794 SEQ ID NO: 19 |
| AAV4 | 59 | US20140348794 SEQ ID NO: 12 |
| AAV4 | 60 | US20140348794 SEQ ID NO: 13 |
| AAV4 | 61 | US20140348794 SEQ ID NO: 7 |
| AAV4 | 62 | US20140348794 SEQ ID NO: 8 |
| AAV4 | 63 | US20140348794 SEQ ID NO: 9 |
| AAV4 | 64 | US20140348794 SEQ ID NO: 2 |
| AAV4 | 65 | US20140348794 SEQ ID NO: 10 |
| AAV4 | 66 | US20140348794 SEQ ID NO. 11 |
| AAV4 | 67 | US20140348794 SEQ ID NO: 18 |
| AAV4 | 68 | US20030138772 SEQ ID NO: 63, |
| | | US20160017295 SEQ ID NO: 4, |
| | | US20140348794 SEQ ID NO: 4 |
| AAV4 | 69 | US20140348794 SEQ ID NO: 16 |
| AAV4 | 70 | US20140348794 SEQ ID NO: 20 |
| AAV4 | 71 | US20140348794 SEQ ID NO: 6 |
| AAV4 | 72 | US20140348794 SEQ ID NO: 1 |
| AAV42.2 | 73 | US20030138772 SEQ ID NO: 9 |
| AAV42.2 | 74 | US20030138772 SEQ ID NO: 102 |
| AAV42.3b | 75 | US20030138772 SEQ ID NO: 36 |
| AAV42.3B | 76 | US20030138772 SEQ ID NO: 107 |
| AAV42.4 | 77 | US20030138772 SEQ ID NO: 33 |
| AAV42.4 | 78 | US20030138772 SEQ ID NO: 88 |
| AAV42.8 | 79 | US20030138772 SEQ ID NO: 27 |
| AAV42.8 | 80 | US20030138772 SEQ ID NO: 85 |
| AAV43.1 | 81 | US20030138772 SEQ ID NO: 39 |
| AAV43.1 | 82 | US20030138772 SEQ ID NO: 92 |
| AAV43.12 | 83 | US20030138772 SEQ ID NO: 41 |
| AAV43.12 | 84 | US20030138772 SEQ ID NO: 93 |
| AAV43.20 | 85 | US20030138772 SEQ ID NO: 42 |
| AAV43.20 | 86 | US20030138772 SEQ ID NO. 99 |
| AAV43.21 | 87 | US20030138772 SEQ ID NO: 43 |
| AAV43.21 | 88 | US20030138772 SEQ ID NO: 96 |
| AAV43.23 | 89 | US20030138772 SEQ ID NO: 44 |
| AAV43.23 | 90 | US20030138772 SEQ ID NO: 98 |
| AAV43.25 | 91 | US20030138772 SEQ ID NO: 45 |
| AAV43.25 | 92 | US20030138772 SEQ ID NO: 97 |
| AAV43.5 | 93 | US20030138772 SEQ ID NO: 40 |
| AAV43.5 | 94 | US20030138772 SEQ ID NO: 94 |
| AAV4-4 | 95 | US20150315612 SEQ ID NO: 201 |
| AAV4-4 | 96 | US20150315612 SEQ ID NO: 218 |
| AAV44.1 | 97 | US20030138772 SEQ ID NO: 46 |
| AAV44.1 | 98 | US20030138772 SEQ ID NO: 79 |
| AAV44.5 | 99 | US20030138772 SEQ ID NO: 47 |
| AAV44.5 | 100 | US20030138772 SEQ ID NO: 80 |
| AAV4407 | 101 | US20150315612 SEQ ID NO: 90 |
| AAV5 | 102 | U.S. Pat. No. 7,427,396 SEQ ID NO: 1 |
| AAV5 | 103 | US20030138772 SEQ ID NO: 114 |
| AAV5 | 104 | US20160017295 SEQ ID NO: 5, |
| | | U.S. Pat. No. 7,427,396 SEQ ID NO: 2, |
| | | US20150315612 SEQ ID NO: 216 |
| AAV5 | 105 | US20150315612 SEQ ID NO: 199 |
| AAV6 | 106 | US20150159173 SEQ ID NO: 13 |
| AAV6 | 107 | US20030138772 SEQ ID NO: 65, |
| | | US20150159173 SEQ ID NO: 29, |
| | | US20160017295 SEQ ID NO: 6, |
| | | U.S. Pat. No. 6,156,303 SEQ ID NO: 7 |
| AAV6 | 108 | U.S. Pat. No. 6,156,303 SEQ ID NO: 11 |
| AAV6 | 109 | U.S. Pat. No. 6,156,303 SEQ ID NO: 2 |
| AAV6 | 110 | US20150315612 SEQ ID NO: 203 |
| AAV6 | 111 | US20150315612 SEQ ID NO: 220 |
| AAV6.1 | 112 | US20150159173 |
| AAV6.12 | 113 | US20150159173 |
| AAV6.2 | 114 | US20150159173 |
| AAV7 | 115 | US20150159173 SEQ ID NO: 14 |
| AAV7 | 116 | US20150315612 SEQ ID NO: 183 |
| AAV7 | 117 | US20030138772 SEQ ID NO: 2, |
| | | US20150159I73 SEQ ID NO: 30, |
| | | US20150315612 SEQ ID NO: 181, |
| | | US20160017295 SEQ ID NO: 7 |
| AAV7 | 118 | US20030138772 SEQ ID NO: 3 |
| AAV7 | 119 | US20030138772 SEQ ID NO: 1, |
| | | US20150315612 SEQ ID NO: 180 |
| AAV7 | 120 | US20150315612 SEQ ID NO: 213 |
| AAV7 | 121 | US20150315612 SEQ ID NO: 222 |
| AAV8 | 122 | US20150159173 SEQ ID NO: 15 |
| AAV8 | 123 | US20150376240 SEQ ID NO: 7 |
| AAV8 | 124 | US20030138772 SEQ ID NO: 4, |
| | | US20150315612 SEQ ID NO: 182 |
| AAV8 | 125 | US20030138772 SEQ ID NO: 95, |
| | | US20140359799 SEQ ID NO: 1, |
| | | US20150159173 SEQ ID NO: 31, |
| | | US20160017295 SEQ ID NO: 8, |
| | | U.S. Pat. No. 7,198,951 SEQ ID NO: 7, |
| | | US20150315612 SEQ ID NO: 223 |
| AAV8 | 126 | US20150376240 SEQ ID NO: 8 |
| AAV8 | 127 | US20150315612 SEQ ID NO: 214 |
| AAV-8b | 128 | US20150376240 SEQ ID NO: 5 |
| AAV-8b | 129 | US20150376240 SEQ ID NO: 3 |
| AAV-8h | 130 | US20150376240 SEQ ID NO: 6 |
| AAV-8h | 131 | US20150376240 SEQ ID NO: 4 |
| AAV9 | 132 | US20030138772 SEQ ID NO: 5 |
| AAV9 | 133 | U.S. Pat. No. 7,198,951 SEQ ID NO: 1 |
| AAV9 | 134 | US20160017295 SEQ ID NO: 9 |
| AAV9 | 135 | US20030138772 SEQ ID NO: 100, |
| | | U.S. Pat. No. 7,198,951 SEQ ID NO: 2 |
| AAV9 | 136 | U.S. Pat. No. 7,198,951 SEQ ID NO: 3 |
| AAV9 (AAVhu.14) | 137 | U.S. Pat. No. 7,906,111 SEQ ID NO: 3; |
| | | WO2015038958 SEQ ID NO: 11 |
| AAV9 (AAVhu.l4) | 138 | U.S. Pat. No. 7,906,111 SEQ ID NO: 123; |
| | | WO2015038958 SEQ ID NO: 2 |
| AAVA3.1 | 139 | US20030138772 SEQ ID NO: 120 |
| AAVA3.3 | 140 | US20030138772 SEQ ID NO: 57 |
| AAVA3.3 | 141 | US20030138772 SEQ ID NO: 66 |
| AAVA3.4 | 142 | US20030138772 SEQ ID NO: 54 |
| AAVA3.4 | 143 | US20030138772 SEQ ID NO: 68 |
| AAVA3.5 | 144 | US20030138772 SEQ ID NO: 55 |
| AAVA3.5 | 145 | US20030138772 SEQ ID NO: 69 |
| AAVA3.7 | 146 | US20030138772 SEQ ID NO: 56 |
| AAVA3.7 | 147 | US20030138772 SEQ ID NO: 67 |
| AAV29.3 (AAVbb.1) | 148 | US20030138772 SEQ ID NO: 11 |
| AAVC2 | 149 | US20030138772 SEQ ID NO: 61 |
| AAVCh.5 | 150 | US20150159173 SEQ ID NO: 46, |
| | | US20150315612 SEQ ID NO: 234 |
| AAVcy.2 (AAV13.3) | 151 | US20030138772 SEQ ID NO: 15 |
| AAV24.1 | 152 | US20030138772 SEQ ID NO: 101 |
| AAVcy.3 (AAV24.1) | 153 | US20030138772 SEQ ID NO: 16 |
| AAV27.3 | 154 | US20030138772 SEQ ID NO: 104 |
| AAVcy.4 (AAV27.3) | 155 | US20030138772 SEQ ID NO: 17 |
| AAVcy.5 | 156 | US20150315612 SEQ ID NO: 227 |
| AAV7.2 | 157 | US20030138772 SEQ ID NO: 103 |
| AAVcy.5 (AAV7.2) | 158 | US20030138772 SEQ ID NO: 18 |
| AAV16.3 | 159 | US20030138772 SEQ ID NO: 105 |
| AAVcy.6 (AAV16.3) | 160 | US20030138772 SEQ ID NO: 10 |
| AAVcy.5 | 161 | US20150159173 SEQ ID NO: 8 |
| AAVcy.5 | 162 | US20150159173 SEQ ID NO: 24 |
| AAVCy.5R1 | 163 | US20150159173 |
| AAVCy.5R2 | 164 | US20150159173 |
| AAVCy.5R3 | 165 | US20150159173 |
| AAVCy.5R4 | 166 | US20150159173 |
| AAVDJ | 167 | US20140359799 SEQ ID NO: 3, |
| | | U.S. Pat. No. 7,588,772 SEQ ID NO: 2 |
| AAVDJ | 168 | US20140359799 SEQ ID NO: 2, |
| | | U.S. Pat. No. 7,588,772 SEQ ID NO: 1 |
| AAVDJ-8 | 169 | U.S. Pat. No. 7,588,772; Grimm et al 2008 |
| AAVDJ-8 | 170 | U.S. Pat. No. 7,588,772; Grimm et al 2008 |
| AAVF5 | 171 | US20030138772 SEQ ID NO: 110 |
| AAVH2 | 172 | US20030138772 SEQ ID NO: 26 |
| AAVH6 | 173 | US20030138772 SEQ ID NO: 25 |
| AAVhE1.1 | 174 | U.S. Pat. No. 9,233,131 SEQ ID NO: 44 |
| AAVhEr1.14 | 175 | U.S. Pat. No. 9,233,131 SEQ ID NO: 46 |
| AAVhEr1.16 | 176 | U.S. Pat. No. 9,233,131 SEQ ID NO: 48 |
| AAVhEr1.18 | 177 | U.S. Pat. No. 9,233,131 SEQ ID NO: 49 |
| AAVhEr1.23 (AAVhEr2.29) | 178 | U.S. Pat. No. 9,233,131 SEQ ID NO: 53 |
| AAVhEr1.35 | 179 | U.S. Pat. No. 9,233,131 SEQ ID NO: 50 |
| AAVhEr1.36 | 180 | U.S. Pat. No. 9,233,131 SEQ ID NO: 52 |
| AAVhEr1.5 | 181 | U.S. Pat. No. 9,233,131 SEQ ID NO: 45 |
| AAVhEr1.7 | 182 | U.S. Pat. No. 9,233,131 SEQ ID NO: 51 |
| AAVhEr1.8 | 183 | U.S. Pat. No. 9,233,131 SEQ ID NO: 47 |
| AAVhEr2.16 | 184 | U.S. Pat. No. 9,233,131 SEQ ID NO: 55 |
| AAVhEr2.30 | 185 | U.S. Pat. No. 9,233,131 SEQ ID NO: 56 |
| AAVhEr2.31 | 186 | U.S. Pat. No. 9,233,131 SEQ ID NO: 58 |
| AAVhEr2.36 | 187 | U.S. Pat. No. 9,233,131 SEQ ID NO: 57 |
| AAVhEr2.4 | 188 | U.S. Pat. No. 9,233,131 SEQ ID NO: 54 |
| AAVhEr3.1 | 189 | U.S. Pat. No. 9,233,131 SEQ ID NO: 59 |
| AAVhu.1 | 190 | US20150315612 SEQ ID NO: 46 |
| AAVhu.1 | 191 | US20150315612 SEQ ID NO: 144 |
| AAVhu.10 (AAV16.8) | 192 | US20150315612 SEQ ID NO: 56 |
| AAVhu.10 (AAV16.8) | 193 | US20150315612 SEQ ID NO: 156 |
| AAVhu.11 (AAV16.12) | 194 | US20150315612 SEQ ID NO: 57 |
| AAVhu.11 (AAV16.12) | 195 | US20150315612 SEQ ID NO: 153 |
| AAVhu.12 | 196 | US20150315612 SEQ ID NO: 59 |
| AAVhu.12 | 197 | US20150315612 SEQ ID NO: 154 |
| AAVhu.13 | 198 | US20150159173 SEQ ID NO: 16, |
| | | US20150315612 SEQ ID NO: 71 |
| AAVhu.13 | 199 | US20150159173 SEQ ID NO: 32, |
| | | US20150315612 SEQ ID NO: 129 |
| AAVhu.136.1 | 200 | US20150315612 SEQ ID NO: 165 |
| AAVhu.140.1 | 201 | US20150315612 SEQ ID NO: 166 |
| AAVhu.140.2 | 202 | US20150315612 SEQ ID NO: 167 |
| AAVhu.145.6 | 203 | US20150315612 SEQ ID No: 178 |
| AAVhu.15 | 204 | US20150315612 SEQ ID NO: 147 |
| AAVhu.15 (AAV33.4) | 205 | US20150315612 SEQ ID NO: 50 |
| AAVhu.156.1 | 206 | US20150315612 SEQ ID No: 179 |
| AAVhu.16 | 207 | US20150315612 SEQ ID NO: 148 |
| AAVhu.16 (AAV33.8) | 208 | US20150315612 SEQ ID NO: 51 |
| AAVhu.17 | 209 | US20150315612 SEQ ID NO: 83 |
| AAVhu.17 (AAV33.12) | 210 | US20150315612 SEQ ID NO: 4 |
| AAVhu.172.1 | 211 | US20150315612 SEQ ID NO: 171 |
| AAVhu.172.2 | 212 | US20150315612 SEQ ID NO: 172 |
| AAVhu.173.4 | 213 | US20150315612 SEQ ID NO: 173 |
| AAVhu.173.8 | 214 | US20150315612 SEQ ID NO: 175 |
| AAVhu.18 | 215 | US20150315612 SEQ ID NO: 52 |
| AAVhu.18 | 216 | US20150315612 SEQ ID NO: 149 |
| AAVhu.19 | 217 | US20150315612 SEQ ID NO: 62 |
| AAVhu.19 | 218 | US20150315612 SEQ ID NO: 133 |
| AAVhu.2 | 219 | US20150315612 SEQ ID NO: 48 |
| AAVhu.2 | 220 | US20150315612 SEQ ID NO: 143 |
| AAVhu.20 | 221 | US20150315612 SEQ ID NO: 63 |
| AAVhu.20 | 222 | US20150315612 SEQ ID NO: 134 |
| AAVhu.21 | 223 | US20150315612 SEQ ID NO: 65 |
| AAVhu.21 | 224 | US20150315612 SEQ ID NO: 135 |
| AAVhu.22 | 225 | US20150315612 SEQ ID NO: 67 |
| AAVhu.22 | 226 | US20150315612 SEQ ID NO: 138 |
| AAVhu.23 | 227 | US20150315612 SEQ ID NO: 60 |
| AAVhu.23.2 | 228 | US20150315612 SEQ ID NO: 137 |
| AAVhu.24 | 229 | US20150315612 SEQ ID NO: 66 |
| AAVhu.24 | 230 | US20150315612 SEQ ID NO: 136 |
| AAVhu.25 | 231 | US20150315612 SEQ ID NO: 49 |
| AAVhu.25 | 232 | US20150315612 SEQ ID NO: 146 |
| AAVhu.26 | 233 | US20150159173 SEQ ID NO: 17, |
| | | US20150315612 SEQ ID NO: 61 |
| AAVhu.26 | 234 | US20150159173 SEQ ID NO: 33, |
| | | US20150315612 SEQ ID NO: 139 |
| AAVhu.27 | 235 | US20150315612 SEQ ID NO: 64 |
| AAVhu.27 | 236 | US20150315612 SEQ ID NO: 140 |
| AAVhu.28 | 237 | US20150315612 SEQ ID NO: 68 |
| AAVhu.28 | 238 | US20150315612 SEQ ID NO: 130 |
| AAVhu.29 | 239 | US20150315612 SEQ ID NO: 69 |
| AAVhu.29 | 240 | US20150159173 SEQ ID NO: 42, |
| | | US20150315612 SEQ ID NO: 132 |
| AAVhu.29 | 241 | US20150315612 SEQ ID NO: 225 |
| AAVhu.29R | 242 | US20150159173 |
| AAVhu.3 | 243 | US20150315612 SEQ ID NO: 44 |
| AAVhu.3 | 244 | US20150315612 SEQ ID NO: 145 |
| AAVhu.30 | 245 | US20150315612 SEQ ID NO: 70 |
| AAVhu.30 | 246 | US20150315612 SEQ ID NO: 131 |
| AAVhu.31 | 247 | US20150315612 SEQ ID NO: 1 |
| AAVhu.31 | 248 | US20150315612 SEQ ID NO: 121 |
| AAVhu.32 | 249 | US20150315612 SEQ ID NO: 2 |
| AAVhu.32 | 250 | US20150315612 SEQ ID NO: 122 |
| AAVhu.33 | 251 | US20150315612 SEQ ID NO: 75 |
| AAVhu.33 | 252 | US20150315612 SEQ ID NO: 124 |
| AAVhu.34 | 253 | US20150315612 SEQ ID NO: 72 |
| AAVhu.34 | 254 | US20150315612 SEQ ID NO: 125 |
| AAVhu.35 | 255 | US20150315612 SEQ ID NO: 73 |
| AAVhu.35 | 256 | US20150315612 SEQ ID NO: 164 |
| AAVhu.36 | 257 | US20150315612 SEQ ID NO: 74 |
| AAVhu.36 | 258 | US20150315612 SEQ ID NO: 126 |
| AAVhu.37 | 259 | US20150159173 SEQ ID NO: 34, |
| | | US20150315612 SEQ ID NO: 88 |
| AAVhu.37 (AAV106.1) | 260 | US20150315612 SEQ ID NO: 10, |
| | | US20150159173 SEQ ID NO: 18 |
| AAVhu.38 | 261 | US20150315612 SEQ ID NO: 161 |
| AAVhu.39 | 262 | US20150315612 SEQ ID NO: 102 |
| AAVhu.39 (AAVLG-9) | 263 | US20150315612 SEQ ID NO: 24 |
| AAVhu.4 | 264 | US20150315612 SEQ ID NO: 47 |
| AAVhu.4 | 265 | US20150315612 SEQ ID NO: 141 |
| AAVhu.40 | 266 | US20150315612 SEQ ID NO: 87 |
| AAVhu.40 (AAV114.3) | 267 | US20150315612 SEQ ID No: 11 |
| AAVhu.41 | 268 | US20150315612 SEQ ID NO: 91 |
| AAVhu.41 (AAV127.2) | 269 | US20150315612 SEQ ID NO: 6 |
| AAVhu.42 | 270 | US20150315612 SEQ ID NO: 85 |
| AAVhu.42 (AAV127.5) | 271 | US20150315612 SEQ ID NO: 8 |
| AAVhu.43 | 272 | US20150315612 SEQ ID NO: 160 |
| AAVhu.43 | 273 | US20150315612 SEQ ID NO: 236 |
| AAVhu.43 (AAV128.1) | 274 | US20150315612 SEQ ID NO: 80 |
| AAVhu.44 | 275 | US20150159173 SEQ ID NO: 45, |
| | | US20150315612 SEQ ID NO: 158 |
| AAVhu.44 (AAV128.3) | 276 | US20150315612 SEQ ID NO: 81 |
| AAVhu.44R1 | 277 | US20150159173 |
| AAVhu.44R2 | 278 | US20150159173 |
| AAVhu.44R3 | 279 | US20150159173 |
| AAVhu.45 | 280 | US20150315612 SEQ ID NO: 76 |
| AAVhu.45 | 281 | US20150315612 SEQ ID NO: 127 |
| AAVhu.46 | 282 | US20150315612 SEQ ID NO: 82 |
| AAVhu.46 | 283 | US20150315612 SEQ ID NO: 159 |
| AAVhu.46 | 284 | US20150315612 SEQ ID NO: 224 |
| AAVhu.47 | 285 | US20150315612 SEQ ID NO: 77 |
| AAVhu.47 | 286 | US20150315612 SEQ ID NO: 128 |
| AAVhu.48 | 287 | US20150159173 SEQ ID NO: 38 |
| AAVhu.48 | 288 | US20150315612 SEQ ID NO: 157 |
| AAVhu.48 (AAV130.4) | 289 | US20150315612 SEQ ID NO: 78 |
| AAVhu.48R1 | 290 | US20150159173 |
| AAVhu.48R2 | 291 | US20150159173 |
| AAVhu.48R3 | 292 | US20150159173 |
| AAVhu.49 | 293 | US20150315612 SEQ ID NO: 209 |
| AAVhu.49 | 294 | US20150315612 SEQ ID NO: 189 |
| AAVhu.5 | 295 | US20150315612 SEQ ID NO: 45 |
| AAVhu.5 | 296 | US20150315612 SEQ ID NO: 142 |
| AAVhu.51 | 297 | US20150315612 SEQ ID NO: 208 |
| AAVhu.51 | 298 | US20150315612 SEQ ID NO: 190 |
| AAVhu.52 | 299 | US20150315612 SEQ ID NO: 210 |
| AAVhu.52 | 300 | US20150315612 SEQ ID NO: 191 |
| AAVhu.53 | 301 | US20150159173 SEQ ID NO: 19 |
| AAVhu.53 | 302 | US20150159173 SEQ ID NO: 35 |
| AAVhu.53 (AAV145.1) | 303 | US20150315612 SEQ ID NO: 176 |
| AAVhu.54 | 304 | US20150315612 SEQ ID NO: 188 |
| AAVhu.54 (AAV145.5) | 305 | US20150315612 SEQ ID No: 177 |
| AAVhu.55 | 306 | US20150315612 SEQ ID NO: 187 |
| AAVhu.56 | 307 | US20150315612 SEQ ID NO: 205 |
| AAVhu.56 (AAV145.6) | 308 | US20150315612 SEQ ID NO: 168 |
| AAVhu.56 (AAV145.6) | 309 | US20150315612 SEQ ID NO: 192 |
| AAVhu.57 | 310 | US20150315612 SEQ ID NO: 206 |
| AAVhu.57 | 311 | US20150315612 SEQ ID NO: 169 |
| AAVhu.57 | 312 | US20150315612 SEQ ID NO: 193 |
| AAVhu.58 | 313 | US20150315612 SEQ ID NO: 207 |
| AAVhu.58 | 314 | US201503I5612 SEQ ID NO: 194 |
| AAVhu.6 (AAV3.1) | 315 | US20150315612 SEQ ID NO: 5 |
| AAVhu.6 (AAV3.1) | 316 | US20150315612 SEQ ID NO: 84 |
| AAVhu.60 | 317 | US20150315612 SEQ ID NO: 184 |
| AAVhu.60 (AAV161.10) | 318 | US20150315612 SEQ ID NO: 170 |
| AAVhu.61 | 319 | US20150315612 SEQ ID NO: 185 |
| AAVhu.61 (AAV161.6) | 320 | US20150315612 SEQ ID NO: 174 |
| AAVhu.63 | 321 | US20150315612 SEQ ID NO: 204 |
| AAVhu.63 | 322 | US20150315612 SEQ ID NO: 195 |
| AAVhu.64 | 323 | US20150315612 SEQ ID NO: 212 |
| AAVhu.64 | 324 | US20150315612 SEQ ID NO: 196 |
| AAVhu.66 | 325 | US20150315612 SEQ ID NO: 197 |
| AAVhu.67 | 326 | US20150315612 SEQ ID NO: 215 |
| AAVhu.67 | 327 | US20150315612 SEQ ID NO: 198 |
| AAVhu.7 | 328 | US20150315612 SEQ ID NO: 226 |
| AAVhu.7 | 329 | US20150315612 SEQ ID NO: 150 |
| AAVhu.7 (AAV7.3) | 330 | US20150315612 SEQ ID NO: 55 |
| AAVhu.71 | 331 | US20150315612 SEQ ID NO: 79 |
| AAVhu.8 | 332 | US20150315612 SEQ ID NO: 53 |
| AAVhu.8 | 333 | US20150315612 SEQ ID NO: 12 |
| AAVhu.8 | 334 | US20150315612 SEQ ID NO: 151 |
| AAVhu.9 (AAV3.1) | 335 | US20150315612 SEQ ID NO: 58 |
| AAVhu.9 (AAV3.1) | 336 | US20150315612 SEQ ID NO: 155 |
| AAV-LK01 | 337 | US20150376607 SEQ ID NO: 2 |
| AAV-LK01 | 338 | US20150376607 SEQ ID NO: 29 |
| AAV-LK02 | 339 | US20150376607 SEQ ID NO: 3 |
| AAV-LK02 | 340 | US20150376607 SEQ ID NO: 30 |
| AAV-LK03 | 341 | US20150376607 SEQ ID NO: 4 |
| AAV-LK03 | 342 | WO2015121501 SEQ ID NO: 12, |
| | | US20150376607 SEQ ID NO: 31 |
| AAV-LK04 | 343 | US20150376607 SEQ ID NO: 5 |
| AAV-LK04 | 344 | US20150376607 SEQ ID NO: 32 |
| AAV-LK05 | 345 | US20150376607 SEQ ID NO: 6 |
| AAV-LK05 | 346 | US20150376607 SEQ ID NO: 33 |
| AAV-LK06 | 347 | US20150376607 SEQ ID NO: 7 |
| AAV-LK06 | 348 | US20150376607 SEQ ID NO: 34 |
| AAV-LK07 | 349 | US20150376607 SEQ ID NO: 8 |
| AAV-LK07 | 350 | US20150376607 SEQ ID NO: 35 |
| AAV-LK08 | 351 | US20150376607 SEQ ID NO: 9 |
| AAV-LK08 | 352 | US20150376607 SEQ ID NO: 36 |
| AAV-LK09 | 353 | US20150376607 SEQ ID NO: 10 |
| AAV-LK09 | 354 | US20150376607 SEQ ID NO: 37 |
| AAV-LK10 | 355 | US20150376607 SEQ ID NO: 11 |
| AAV-LK10 | 356 | US20150376607 SEQ ID NO: 38 |
| AAV-LK11 | 357 | US20150376607 SEQ ID NO: 12 |
| AAV-LK11 | 358 | US20150376607 SEQ ID NO: 39 |
| AAV-LK12 | 359 | US20150376607 SEQ ID NO: 13 |
| AAV-LK12 | 360 | US20150376607 SEQ ID NO: 40 |
| AAV-LK13 | 361 | US20150376607 SEQ ID NO: 14 |
| AAV-LK13 | 362 | US20150376607 SEQ ID NO: 41 |
| AAV-LK14 | 363 | US20150376607 SEQ ID NO: 15 |
| AAV-LK14 | 364 | US20150376607 SEQ ID NO: 42 |
| AAV-LK15 | 365 | US20150376607 SEQ ID NO: 16 |
| AAV-LK15 | 366 | US20150376607 SEQ ID NO: 43 |
| AAV-LK16 | 367 | US20150376607 SEQ ID NO: 17 |
| AAV-LK16 | 368 | US20150376607 SEQ ID NO: 44 |
| AAV-LK17 | 369 | US20150376607 SEQ ID NO: 18 |
| AAV-LK17 | 370 | US20150376607 SEQ ID NO: 45 |
| AAV-LK18 | 371 | US20150376607 SEQ ID NO: 19 |
| AAV-LK18 | 372 | US20150376607 SEQ ID NO: 46 |
| AAV-LK19 | 373 | US20150376607 SEQ ID NO: 20 |
| AAV-LK19 | 374 | US20150376607 SEQ ID NO: 47 |
| AAV-PAEC | 375 | US20150376607 SEQ ID NO: 1 |
| AAV-PAEC | 376 | US20150376607 SEQ ID NO: 48 |
| AAV-PAEC11 | 377 | US20150376607 SEQ ID NO: 26 |
| AAV-PAEC11 | 378 | US20150376607 SEQ ID NO: 54 |
| AAV-PAEC12 | 379 | US20150376607 SEQ ID NO: 27 |
| AAV-PAEC12 | 380 | US20150376607 SEQ ID NO: 51 |
| AAV-PAEC13 | 381 | US20150376607 SEQ ID NO: 28 |
| AAV-PAEC13 | 382 | US20150376607 SEQ ID NO: 49 |
| AAV-PAEC2 | 383 | US20150376607 SEQ ID NO: 21 |
| AAV-PAEC2 | 384 | US20150376607 SEQ ID NO: 56 |
| AAV-PAEC4 | 385 | US20150376607 SEQ ID NO: 22 |
| AAV-PAEC4 | 386 | US20150376607 SEQ ID NO: 55 |
| AAV-PAEC6 | 387 | US20150376607 SEQ ID NO: 23 |
| AAV-PAEC6 | 388 | US20150376607 SEQ ID NO: 52 |
| AAV-PAEC7 | 389 | US20150376607 SEQ ID NO: 24 |
| AAV-PAEC7 | 390 | US20150376607 SEQ ID NO: 53 |
| AAV-PAEC8 | 391 | US20150376607 SEQ ID NO: 25 |
| AAV-PAEC8 | 392 | US20150376607 SEQ ID NO: 50 |
| AAVpi.1 | 393 | US20150315612 SEQ ID NO: 28 |
| AAVpi.1 | 394 | US20150315612 SEQ ID NO: 93 |
| AAVpi.2 | 395 | US20150315612 SEQ ID NO: 30 |
| AAVpi.2 | 396 | US20150315612 SEQ ID NO: 95 |
| AAVpi.3 | 397 | US20150315612 SEQ ID NO: 29 |
| AAVpi.3 | 398 | US20150315612 SEQ ID NO: 94 |
| AAVrh.10 | 399 | US20150159173 SEQ ID NO: 9 |
| AAVrh.10 | 400 | US20150159173 SEQ ID NO: 25 |
| AAV44.2 | 401 | US20030138772 SEQ ID NO: 59 |
| AAVrh.10 (AAV44.2) | 402 | US20030138772 SEQ ID NO: 81 |
| AAV42.1B | 403 | US20030138772 SEQ ID NO: 90 |
| AAVrh.12 (AAV42.1b) | 404 | US20030138772 SEQ ID NO: 30 |
| AAVrh.13 | 405 | US20150159173 SEQ ID NO: 10 |
| AAVrh.13 | 406 | US20150159173 SEQ ID NO: 26 |
| AAVrh.13 | 407 | US20150315612 SEQ ID NO: 228 |
| AAVrh.13R | 408 | US20150159173 |
| AAV42.3A | 409 | US20030138772 SEQ ID NO: 87 |
| AAVrh.14 (AAV42.3a) | 410 | US20030138772 SEQ ID NO: 32 |
| AAV42.5A | 411 | US20030138772 SEQ ID NO: 89 |
| AAVrh.17 (AAV42.5a) | 412 | US20030138772 SEQ ID NO: 34 |
| AAV42.5B | 413 | US20030138772 SEQ ID NO: 91 |
| AAVrh.18 (AAV42.5b) | 414 | US20030138772 SEQ ID NO: 29 |
| AAV42.6B | 415 | US20030138772 SEQ ID NO: 112 |
| AAVrh.19 (AAV42.6b) | 416 | US20030138772 SEQ ID NO: 38 |
| AAVrh.2 | 417 | US20150159173 SEQ ID NO: 39 |
| AAVrh.2 | 418 | US20150315612 SEQ ID NO: 231 |
| AAVrh.20 | 419 | US20150159173 SEQ ID NO: 1 |
| AAV42.10 | 420 | US20030138772 SEQ ID NO: 106 |
| AAVrh.21 (AAV42.10) | 421 | US20030138772 SEQ ID NO: 35 |
| AAV42.11 | 422 | US20030138772 SEQ ID NO: 108 |
| AAVrh.22 (AAV42.11) | 423 | US20030138772 SEQ ID NO: 37 |
| AAV42.12 | 424 | US20030138772 SEQ ID NO: 113 |
| AAVrh.23 (AAV42.12) | 425 | US20030138772 SEQ ID NO: 58 |
| AAV42.13 | 426 | US20030138772 SEQ ID NO: 86 |
| AAVrh.24 (AAV42.13) | 427 | US20030138772 SEQ ID NO: 31 |
| AAV42.15 | 428 | US20030138772 SEQ ID NO: 84 |
| AAVrh.25 (AAV42.15) | 429 | US20030138772 SEQ ID NO: 28 |
| AAVrh.2R | 430 | US20150159173 |
| AAVrh.31 (AAV223.1) | 431 | US20030138772 SEQ ID NO: 48 |
| AAVC1 | 432 | US20030138772 SEQ ID NO: 60 |
| AAVrh.32 (AAVC1) | 433 | US20030138772 SEQ ID NO: 19 |
| AAVrh.32/33 | 434 | US20150159173 SEQ ID NO: 2 |
| AAVrh.33 (AAVC3) | 435 | US20030138772 SEQ ID NO: 20 |
| AAVC5 | 436 | US20030138772 SEQ ID NO: 62 |
| AAVrh.34 (AAVC5) | 437 | US20030138772 SEQ ID NO: 21 |
| AAVF1 | 438 | US20030138772 SEQ ID NO: 109 |
| AAVrh.35 (AAVF1) | 439 | US20030138772 SEQ ID NO: 22 |
| AAVF3 | 440 | US20030138772 SEQ ID NO: 111 |
| AAVrh.36 (AAVF3) | 441 | US20030138772 SEQ ID NO: 23 |
| AAVrh.37 | 442 | US20030I38772 SEQ ID NO: 24 |
| AAVrh.37 | 443 | US20150159173 SEQ ID NO: 40 |
| AAVrh.37 | 444 | US20150315612 SEQ ID NO: 229 |
| AAVrh.37R2 | 445 | US20150159173 |
| AAVrh.38 (AAVLG-4) | 446 | US20150315612 SEQ ID NO: 7 |
| AAVrh.38 (AAVLG-4) | 447 | US20150315612 SEQ ID NO: 86 |
| AAVrh.39 | 448 | US20150159173 SEQ ID NO: 20, |
| | | US20150315612 SEQ ID NO: 13 |
| AAVrh.39 | 449 | US20150159173 SEQ ID NO: 3, |
| | | US20150159173 SEQ ID NO: 36, |
| | | US20150315612 SEQ ID NO: 89 |
| AAVrh.40 | 450 | US20150315612 SEQ ID NO: 92 |
| AAVrh.40 (AAVLG-10) | 451 | US20150315612 SEQ ID NO: 14 |
| AAVrh.43 (AAVN721-8) | 452 | US20150315612 SEQ ID NO: 43, |
| | | US20150159173 SEQ ID NO: 21 |
| AAVrh.43 (AAVN721-8) | 453 | US20150315612 SEQ ID NO: 163, |
| | | US20150159173 SEQ ID NO: 37 |
| AAVrh.44 | 454 | US20150315612 SEQ ID NO: 34 |
| AAVrh.44 | 455 | US20150315612 SEQ ID NO: 111 |
| AAVrh.45 | 456 | US20150315612 SEQ ID NO: 41 |
| AAVrh.45 | 457 | US20150315612 SEQ ID NO: 109 |
| AAVrh.46 | 458 | US20150159173 SEQ ID NO: 22, |
| | | US20150315612 SEQ ID NO: 19 |
| AAVrh.46 | 459 | US20150159173 SEQ ID NO: 4, |
| | | US20150315612 SEQ ID NO: 101 |
| AAVrh.47 | 460 | US20150315612 SEQ ID NO: 38 |
| AAVrh.47 | 461 | US201503156I2 SEQ ID NO: 118 |
| AAVrh.48 | 462 | US20150159173 SEQ ID NO: 44, |
| | | US20150315612 SEQ ID NO: 115 |
| AAVrh.48.1 | 463 | US20150159173 |
| AAVrh.48.1.2 | 464 | US20150159173 |
| AAVrh.48.2 | 465 | US20150159173 |
| AAVrh.48 (AAV1-7) | 466 | US20150315612 SEQ ID NO: 32 |
| AAVrh.49 (AAV1-8) | 467 | US20150315612 SEQ ID NO: 25 |
| AAVrh.49 (AAV1-8) | 468 | US20150315612 SEQ ID NO: 103 |
| AAVrh.50 (AAV2-4) | 469 | US20150315612 SEQ ID NO: 23 |
| AAVrh.50 (AAV2-4) | 470 | US20150315612 SEQ ID NO: 108 |
| AAVrh.51 (AAV2-5) | 471 | US20150315612 SEQ ID No: 22 |
| AAVrh.51 (AAV2-5) | 472 | US20150315612 SEQ ID NO: 104 |
| AAVrh.52 (AAV3-9) | 473 | US20150315612 SEQ ID NO: 18 |
| AAVrh.52 (AAV3-9) | 474 | US20150315612 SEQ ID NO: 96 |
| AAVrh.53 | 475 | US20150315612 SEQ ID NO: 97 |
| AAVrh.53 (AAV3-11) | 476 | US20150315612 SEQ ID NO: 17 |
| AAVrh.53 (AAV3-11) | 477 | US20150315612 SEQ ID NO: 186 |
| AAVrh.54 | 478 | US20150315612 SEQ ID NO: 40 |
| AAVrh.54 | 479 | US20150159173 SEQ ID NO: 49, |
| | | US20150315612 SEQ ID NO: 116 |
| AAVrh.55 | 480 | US20150315612 SEQ ID NO: 37 |
| AAVrh.55 (AAV4-19) | 481 | US20150315612 SEQ ID NO: 117 |
| AAVrh.56 | 482 | US20150315612 SEQ ID NO: 54 |
| AAVrh.56 | 483 | US20150315612 SEQ ID NO: 152 |
| AAVrh.57 | 484 | US20150315612 SEQ ID NO: 26 |
| AAVrh.57 | 485 | US2015031.5612 SEQ ID NO: 105 |
| AAVrh.58 | 486 | US20150315612 SEQ ID NO: 27 |
| AAVrh.58 | 487 | US20150159173 SEQ ID NO: 48, |
| | | US20150315612 SEQ ID NO: 106 |
| AAVrh.58 | 488 | US20150315612 SEQ ID NO: 232 |
| AAVrh.59 | 489 | US20150315612 SEQ ID NO: 42 |
| AAVrh.59 | 490 | US20150315612 SEQ ID NO: 110 |
| AAVrh.60 | 491 | US20150315612 SEQ ID NO: 31 |
| AAVrh.60 | 492 | US20150315612 SEQ ID NO: 120 |
| AAVrh.61 | 493 | US20150315612 SEQ ID NO: 107 |
| AAVrh.61 (AAV2-3) | 494 | US20150315612 SEQ ID NO: 21 |
| AAVrh.62 (AAV2-15) | 495 | US20150315612 SEQ ID No: 33 |
| AAVrh.62 (AAV2-15) | 496 | US20150315612 SEQ ID NO: 114 |
| AAVrh.64 | 497 | US20150315612 SEQ ID No: 15 |
| AAVrh.64 | 498 | US20150159173 SEQ ID NO: 43, |
| | | US20150315612 SEQ ID NO: 99 |
| AAVrh.64 | 499 | US20150315612 SEQ ID NO: 233 |
| AAVRh.64R1 | 500 | US20150159173 |
| AAVRh.64R2 | 501 | US20150159173 |
| AAVrh.65 | 502 | US20150315612 SEQ ID NO: 35 |
| AAVrh.65 | 503 | US20150315612 SEQ ID NO: 112 |
| AAVrh.67 | 504 | US20150315612 SEQ ID NO: 36 |
| AAVrh.67 | 505 | US20150315612 SEQ ID NO: 230 |
| AAVrh.67 | 506 | US20150159173 SEQ ID NO: 47, |
| | | US20150315612 SEQ ID NO: 113 |
| AAVrh.68 | 507 | US20150315612 SEQ ID NO: 16 |
| AAVrh.68 | 508 | US20150315612 SEQ ID NO: 100 |
| AAVrh.69 | 509 | US20150315612 SEQ ID NO: 39 |
| AAVrh.69 | 510 | US20150315612 SEQ ID NO: 119 |
| AAVrh.70 | 511 | US20150315612 SEQ ID NO: 20 |
| AAVrh.70 | 512 | US20150315612 SEQ ID NO: 98 |
| AAVrh.71 | 513 | US20150315612 SEQ ID NO: 162 |
| AAVrh.72 | 514 | US20150315612 SEQ ID NO: 9 |
| AAVrh.73 | 515 | US20150159I73 SEQ ID NO: 5 |
| AAVrh.74 | 516 | US20150159173 SEQ ID NO: 6 |
| AAVrh.8 | 517 | US20150159173 SEQ ID NO: 41 |
| AAVrh.8 | 518 | US20150315612 SEQ ID NO: 235 |
| AAVrh.8R | 519 | US20150159173, WO2015168666 SEQ ID NO: 9 |
| AAVrh.8R A586R mutant | 520 | WO2015168666 SEQ ID NO: 10 |
| AAVrh.8R R533A mutant | 521 | WO2015168666 SEQ ID NO: 11 |
| BAAV (bovine AAV) | 522 | U.S. Pat. No. 9,193,769 SEQ ID NO: 8 |
| BAAV (bovine AAV) | 523 | U.S. Pat. No. 9,193,769 SEQ ID NO: 10 |
| BAAV (bovine AAV) | 524 | U.S. Pat. No. 9,193,769 SEQ ID NO: 4 |
| BAAV (bovine AAV) | 525 | U.S. Pat. No. 9,193,769 SEQ ID NO: 2 |
| BAAV (bovine AAV) | 526 | U.S. Pat. No. 9,193,769 SEQ ID NO: 6 |
| BAAV (bovine AAV) | 527 | U.S. Pat. No. 9,193,769 SEQ ID NO: 1 |
| BAAV (bovine AAV) | 528 | U.S. Pat. No. 9,193,769 SEQ ID NO: 5 |
| BAAV (bovine AAV) | 529 | U.S. Pat. No. 9,193,769 SEQ ID NO: 3 |
| BAAV (bovine AAV) | 530 | U.S. Pat. No. 9,193,769 SEQ ID NO: 11 |
| BAAV (bovine AAV) | 531 | U.S. Pat. No. 7,427,396 SEQ ID NO: 5 |
| BAAV (bovine AAV) | 532 | U.S. Pat. No. 7,427,396 SEQ ID NO: 6 |
| BAAV (bovine AAV) | 533 | U.S. Pat. No. 9,193,769 SEQ ID NO: 7 |
| BAAV (bovine AAV) | 534 | U.S. Pat. No. 9,193,769 SEQ ID NO: 9 |
| BNP61 AAV | 535 | US20150238550 SEQ ID NO: 1 |
| BNP61 AAV | 536 | US20150238550 SEQ ID NO: 2 |
| BNP62 AAV | 537 | US20150238550 SEQ ID NO: 3 |
| BNP63 AAV | 538 | US20150238550 SEQ ID NO: 4 |
| caprine AAV | 539 | U.S. Pat. No. 7,427,396 SEQ ID NO: 3 |
| caprine AAV | 540 | U.S. Pat. No. 7,427,396 SEQ ID NO: 4 |
| true type AAV (ttAAV) | 541 | WO2015121501 SEQ ID NO: 2 |
| AAAV (Avian AAV) | 542 | U.S. Pat. No. 9,238,800 SEQ ID NO: 12 |
| AAAV (Avian AAV) | 543 | U.S. Pat. No. 9,238,800 SEQ ID NO: 2 |
| AAAV (Avian AAV) | 544 | U.S. Pat. No. 9,238,800 SEQ ID NO: 6 |
| AAAV (Avian AAV) | 545 | U.S. Pat. No. 9,238,800 SEQ ID NO: 4 |
| AAAV (Avian AAV) | 546 | U.S. Pat. No. 9,238,800 SEQ ID NO: 8 |
| AAAV (Avian AAV) | 547 | U.S. Pat. No. 9,238,800 SEQ ID NO: 14 |
| AAAV (Avian AAV) | 548 | U.S. Pat. No. 9,238,800 SEQ ID NO: 10 |
| AAAV (Avian AAV) | 549 | U.S. Pat. No. 9,238,800 SEQ ID NO: 15 |
| AAAV (Avian AAV) | 550 | U.S. Pat. No. 9,238,800 SEQ ID NO: 5 |
| AAAV (Avian AAV) | 551 | U.S. Pat. No. 9,238,800 SEQ ID NO: 9 |
| AAAV (Avian AAV) | 552 | U.S. Pat. No. 9,238,800 SEQ ID NO: 3 |
| AAAV (Avian AAV) | 553 | U.S. Pat. No. 9,238,800 SEQ ID NO: 7 |
| AAAV (Avian AAV) | 554 | U.S. Pat. No. 9,238,800 SEQ ID NO: 11 |
| AAAV (Avian AAV) | 555 | U.S. Pat. No. 9,238,800 SEQ ID NO: 13 |
| AAAV (Avian AAV) | 556 | U.S. Pat. No. 9,238,800 SEQ ID NO: 1 |
| AAV Shuffle 100-1 | 557 | US20160017295 SEQ ID NO: 23 |
| AAV Shuffle 100-1 | 558 | US20160017295 SEQ ID NO: 11 |
| AAV Shuffle 100-2 | 559 | US20160017295 SEQ ID NO: 37 |
| AAV Shuffle 100-2 | 560 | US20160017295 SEQ ID NO: 29 |
| AAV Shuffle 100-3 | 561 | US20160017295 SEQ ID NO: 24 |
| AAV Shuffle 100-3 | 562 | US20160017295 SEQ ID NO: 12 |
| AAV Shuffle 100-7 | 563 | US20160017295 SEQ ID NO: 25 |
| AAV Shuffle 100-7 | 564 | US20160017295 SEQ ID NO: 13 |
| AAV Shuffle 10-2 | 565 | US20160017295 SEQ ID NO: 34 |
| AAV Shuffle 10-2 | 566 | US20160017295 SEQ ID NO: 26 |
| AAV Shuffle 10-6 | 567 | US20160017295 SEQ ID NO: 35 |
| AAV Shuffle 10-6 | 568 | US20160017295 SEQ ID NO: 27 |
| AAV Shuffle 10-8 | 569 | US20160017295 SEQ ID NO: 36 |
| AAV Shuffle 10-8 | 570 | US20160017295 SEQ ID NO: 28 |
| AAV SM 100-10 | 571 | US20160017295 SEQ ID NO: 41 |
| AAV SM 100-10 | 572 | US20160017295 SEQ ID NO: 33 |
| AAV SM 100-3 | 573 | US20160017295 SEQ ID NO: 40 |
| AAV SM 100-3 | 574 | US20160017295 SEQ ID NO: 32 |
| AAV SM 10-1 | 575 | US20160017295 SEQ ID NO: 38 |
| AAV SM 10-1 | 576 | US20160017295 SEQ ID NO: 30 |
| AAV SM 10-2 | 577 | US20160017295 SEQ ID NO: 10 |
| AAV SM 10-2 | 578 | US20160017295 SEQ ID NO: 22 |
| AAV SM 10-8 | 579 | US20160017295 SEQ ID NO: 39 |
| AAV SM 10-8 | 580 | US20160017295 SEQ ID NO: 31 |
| AAVF1/HSC1 | 581 | WO2016049230 SEQ ID NO: 20 |
| AAVF2/HSC2 | 582 | WO2016049230 SEQ ID NO: 21 |
| AAVF3/HSC3 | 583 | WO2016049230 SEQ ID NO: 22 |
| AAVF4/HSC4 | 584 | WO2016049230 SEQ ID NO: 23 |
| AAVF5/HSC5 | 585 | WO2016049230 SEQ ID NO: 25 |
| AAVF6/HSC6 | 586 | WO2016049230 SEQ ID NO: 24 |
| AAVF7/HSC7 | 587 | WO2016049230 SEQ ID NO: 27 |
| AAVF8/HSC8 | 588 | WO2016049230 SEQ ID NO: 28 |
| AAVF9/HSC9 | 589 | WO2016049230 SEQ ID NO: 29 |
| AAVF11/HSC11 | 590 | WO2016049230 SEQ ID NO: 26 |
| AAVF12/HSC12 | 591 | WO2016049230 SEQ ID NO: 30 |
| AAVF13/HSC13 | 592 | WO2016049230 SEQ ID NO: 31 |
| AAVF14/HSC14 | 593 | WO2016049230 SEQ ID NO: 32 |
| AAVF15/HSC15 | 594 | WO2016049230 SEQ ID NO: 33 |
| AAVF16/HSC16 | 595 | WO2016049230 SEQ ID NO: 34 |
| AAVF17/HSC17 | 596 | WO2016049230 SEQ ID NO: 35 |
| AAVF1/HSC1 | 597 | WO2016049230 SEQ ID NO: 2 |
| AAVF2/HSC2 | 598 | WO2016049230 SEQ ID NO: 3 |
| AAVF3/HSC3 | 599 | WO2016049230 SEQ ID NO: 5 |
| AAVF4/HSC4 | 600 | WO2016049230 SEQ ID NO: 6 |
| AAVF5/HSC5 | 601 | WO2016049230 SEQ ID NO: 11 |
| AAVF6/HSC6 | 602 | WO2016049230 SEQ ID NO: 7 |
| AAVF7/HSC7 | 603 | WO2016049230 SEQ ID NO: 8 |
| AAVF8/HSC8 | 604 | WO2016049230 SEQ ID NO: 9 |
| AAVF9/HSC9 | 605 | WO2016049230 SEQ ID NO: 10 |
| AAVF11/HSC11 | 606 | WO2016049230 SEQ ID NO: 4 |
| AAVF12/HSC12 | 607 | WO2016049230 SEQ ID NO: 12 |
| AAVF13/HSC13 | 608 | WO2016049230 SEQ ID NO: 14 |
| AAVF14/HSC14 | 609 | WO2016049230 SEQ ID NO: 15 |
| AAVF15/HSC15 | 610 | WO2016049230 SEQ ID NO: 16 |
| AAVF16/HSC16 | 611 | WO2016049230 SEQ ID NO: 17 |
| AAVF17/HSC17 | 612 | WO2016049230 SEQ ID NO: 13 |
| AAV CBr-E1 | 613 | U.S. Pat. No. 8,734,809 SEQ ID NO: 13 |
| AAV CBr-E2 | 614 | U.S. Pat. No. 8,734,809 SEQ ID NO: 14 |
| AAV CBr-E3 | 615 | U.S. Pat. No. 8,734,809 SEQ ID NO: 15 |
| AAV CBr-E4 | 616 | U.S. Pat. No. 8,734,809 SEQ ID NO: 16 |
| AAV CBr-E5 | 617 | U.S. Pat. No. 8,734,809 SEQ ID NO: 17 |
| AAV CBr-e5 | 618 | U.S. Pat. No. 8,734,809 SEQ ID NO: 18 |
| AAV CBr-E6 | 619 | U.S. Pat. No. 8,734,809 SEQ ID NO: 19 |
| AAV CBr-E7 | 620 | U.S. Pat. No. 8,734,809 SEQ ID NO: 20 |
| AAV CBr-E8 | 621 | U.S. Pat. No. 8,734,809 SEQ ID NO: 21 |
| AAV CLv-D1 | 622 | U.S. Pat. No. 8,734,809 SEQ ID NO: 22 |
| AAV CLv-D2 | 623 | U.S. Pat. No. 8,734,809 SEQ ID NO: 23 |
| AAV CLv-D3 | 624 | U.S. Pat. No. 8,734,809 SEQ ID NO: 24 |
| AAV CLv-D4 | 625 | U.S. Pat. No. 8,734,809 SEQ ID NO: 25 |
| AAV CLv-D5 | 626 | U.S. Pat. No. 8,734,809 SEQ ID NO: 26 |
| AAV CLv-D6 | 627 | U.S. Pat. No. 8,734,809 SEQ ID NO: 27 |
| AAV CLv-D7 | 628 | U.S. Pat. No. 8,734,809 SEQ ID NO: 28 |
| AAV CLv-D8 | 629 | U.S. Pat. No. 8,734,809 SEQ ID NO: 29 |
| AAV CLv-E1 | 630 | U.S. Pat. No. 8,734,809 SEQ ID NO: 13 |
| AAV CLv-R1 | 631 | U.S. Pat. No. 8,734,809 SEQ ID NO: 30 |
| AAV CLv-R2 | 632 | U.S. Pat. No. 8,734,809 SEQ ID NO: 31 |
| AAV CLv-R3 | 633 | U.S. Pat. No. 8,734,809 SEQ ID NO: 32 |
| AAV CLv-R4 | 634 | U.S. Pat. No. 8,734,809 SEQ ID NO: 33 |
| AAV CLv-R5 | 635 | U.S. Pat. No. 8,734,809 SEQ ID NO: 34 |
| AAV CLv-R6 | 636 | U.S. Pat. No. 8,734,809 SEQ ID NO: 35 |
| AAV CLv-R7 | 637 | U.S. Pat. No. 8,734,809 SEQ ID NO: 36 |
| AAV CLv-R8 | 638 | U.S. Pat. No. 8,734,809 SEQ ID NO: 37 |
| AAV CLv-R9 | 639 | U.S. Pat. No. 8,734,809 SEQ ID NO: 38 |
| AAV CLg-F1 | 640 | U.S. Pat. No. 8,734,809 SEQ ID NO: 39 |
| AAV CLg-F2 | 641 | U.S. Pat. No. 8,734,809 SEQ ID NO: 40 |
| AAV CLg-F3 | 642 | U.S. Pat. No. 8,734,809 SEQ ID NO: 41 |
| AAV CLg-F4 | 643 | U.S. Pat. No. 8,734,809 SEQ ID NO: 42 |
| AAV CLg-F5 | 644 | U.S. Pat. No. 8,734,809 SEQ ID NO: 43 |
| AAV CLg-F6 | 645 | U.S. Pat. No. 8,734,809 SEQ ID NO: 43 |
| AAV CLg-F7 | 646 | U.S. Pat. No. 8,734,809 SEQ ID NO: 44 |
| AAV CLg-F8 | 647 | U.S. Pat. No. 8,734,809 SEQ ID NO: 43 |
| AAV CSp-1 | 648 | U.S. Pat. No. 8,734,809 SEQ ID NO: 45 |
| AAV CSp-10 | 649 | U.S. Pat. No. 8,734,809 SEQ ID NO: 46 |
| AAV CSp-11 | 650 | U.S. Pat. No. 8,734,809 SEQ ID NO: 47 |
| AAV CSp-2 | 651 | U.S. Pat. No. 8,734,809 SEQ ID NO: 48 |
| AAV CSp-3 | 652 | U.S. Pat. No. 8,734,809 SEQ ID NO: 49 |
| AAV CSp-4 | 653 | U.S. Pat. No. 8,734,809 SEQ ID NO: 50 |
| AAV CSp-6 | 654 | U.S. Pat. No. 8,734,809 SEQ ID NO: 51 |
| AAV CSp-7 | 655 | U.S. Pat. No. 8,734,809 SEQ ID NO: 52 |
| AAV CSp-8 | 656 | U.S. Pat. No. 8,734,809 SEQ ID NO: 53 |
| AAV CSp-9 | 657 | U.S. Pat. No. 8,734,809 SEQ ID NO: 54 |
| AAV CHt-2 | 658 | U.S. Pat. No. 8,734,809 SEQ ID NO: 55 |
| AAV CHt-3 | 659 | U.S. Pat. No. 8,734,809 SEQ ID NO: 56 |
| AAV CKd-1 | 660 | U.S. Pat. No. 8,734,809 SEQ ID NO: 57 |
| AAV CKd-10 | 661 | U.S. Pat. No. 8,734,809 SEQ ID NO: 58 |
| AAV CKd-2 | 662 | U.S. Pat. No. 8,734,809 SEQ ID NO: 59 |
| AAV CKd-3 | 663 | U.S. Pat. No. 8,734,809 SEQ ID NO: 60 |
| AAV CKd-4 | 664 | U.S. Pat. No. 8,734,809 SEQ ID NO: 61 |
| AAV CKd-6 | 665 | U.S. Pat. No. 8,734,809 SEQ ID NO: 62 |
| AAVC Kd-7 | 666 | U.S. Pat. No. 8,734,809 SEQ ID NO: 63 |
| AAVC Kd-8 | 667 | U.S. Pat. No. 8,734,809 SEQ ID NO: 64 |
| AAV CLv-1 | 668 | U.S. Pat. No. 8,734,809 SEQ ID NO: 65 |
| AAV CLv-12 | 669 | U.S. Pat. No. 8,734,809 SEQ ID NO: 66 |
| AAV CLv-13 | 670 | U.S. Pat. No. 8,734,809 SEQ ID NO: 67 |
| AAVC Lv-2 | 671 | U.S. Pat. No. 8,734,809 SEQ ID NO: 68 |
| AAVC Lv-3 | 672 | U.S. Pat. No. 8,734,809 SEQ ID NO: 69 |
| AAV CLv-4 | 673 | U.S. Pat. No. 8,734,809 SEQ ID NO: 70 |
| AAVC Lv-6 | 674 | U.S. Pat. No. 8,734,809 SEQ ID NO: 71 |
| AAVC Lv-8 | 675 | U.S. Pat. No. 8,734,809 SEQ ID NO: 72 |
| AAVC Kd-B1 | 676 | U.S. Pat. No. 8,734,809 SEQ ID NO: 73 |
| AAV CKd-B2 | 677 | U.S. Pat. No. 8,734,809 SEQ ID NO: 74 |
| AAV CKd-B3 | 678 | U.S. Pat. No. 8,734,809 SEQ ID NO: 75 |
| AAV CKd-B4 | 679 | U.S. Pat. No. 8,734,809 SEQ ID NO: 76 |
| AAVC Kd-B5 | 680 | U.S. Pat. No. 8,734,809 SEQ ID NO: 77 |
| AAV CKd-B6 | 681 | U.S. Pat. No. 8,734,809 SEQ ID NO: 78 |
| AAV CKd-B7 | 682 | U.S. Pat. No. 8,734,809 SEQ ID NO: 79 |
| AAV CKd-B8 | 683 | U.S. Pat. No. 8,734,809 SEQ ID NO: 80 |
| AAV CKd-H1 | 684 | U.S. Pat. No. 8,734,809 SEQ ID NO: 81 |
| AAV CKd-H2 | 685 | U.S. Pat. No. 8,734,809 SEQ ID NO: 82 |
| AAV CKd-H3 | 686 | U.S. Pat. No. 8,734,809 SEQ ID NO: 83 |
| AAV CKd-H4 | 687 | U.S. Pat. No. 8,734,809 SEQ ID NO: 84 |
| AAV CKd-H5 | 688 | U.S. Pat. No. 8,734,809 SEQ ID NO: 85 |
| AAV CKd-H6 | 689 | U.S. Pat. No. 8,734,809 SEQ ID NO: 77 |
| AAV CHt-1 | 690 | U.S. Pat. No. 8,734,809 SEQ ID NO: 86 |
| AAV CLv1-1 | 691 | U.S. Pat. No. 8,734,809 SEQ ID NO: 171 |
| AAV CLv1-2 | 692 | U.S. Pat. No. 8,734,809 SEQ ID NO: 172 |
| AAV CLv1-3 | 693 | U.S. Pat. No. 8,734,809 SEQ ID NO: 173 |
| AAV CLv1-4 | 694 | U.S. Pat. No. 8,734,809 SEQ ID NO: 174 |
| AAV CLv1-7 | 695 | U.S. Pat. No. 8,734,809 SEQ ID NO: 175 |
| AAV Clv1-8 | 696 | U.S. Pat. No. 8,734,809 SEQ ID NO: 176 |
| AAV Clv1-9 | 697 | U.S. Pat. No. 8,734,809 SEQ ID NO: 177 |
| AAV Clv1-10 | 698 | U.S. Pat. No. 8,734,809 SEQ ID NO: 178 |
| AAV.VR-355 | 699 | U.S. Pat. No. 8,734,809 SEQ ID NO: 181 |
| AAV.hu.48R3 | 700 | U.S. Pat. No. 8,734,809 SEQ ID NO: 183 |
| AAV CBr-E1 | 701 | U.S. Pat. No. 8,734,809 SEQ ID NO: 87 |
| AAV CBr-E2 | 702 | U.S. Pat. No. 8,734,809 SEQ ID NO: 88 |
| AAV CBr-E3 | 703 | U.S. Pat. No. 8,734,809 SEQ ID NO: 89 |
| AAV CBr-E4 | 704 | U.S. Pat. No. 8,734,809 SEQ ID NO: 90 |
| AAV CBr-E5 | 705 | U.S. Pat. No. 8,734,809 SEQ ID NO: 91 |
| AAV CBr-e5 | 706 | U.S. Pat. No. 8,734,809 SEQ ID NO: 92 |
| AAVC Br-E6 | 707 | U.S. Pat. No. 8,734,809 SEQ ID NO: 93 |
| AAVC Br-E7 | 708 | U.S. Pat. No. 8,734,809 SEQ ID NO: 94 |
| AAV CBr-E8 | 709 | U.S. Pat. No. 8,734,809 SEQ ID NO: 95 |
| AAV CLv-D1 | 710 | U.S. Pat. No. 8,734,809 SEQ ID NO: 96 |
| AAV CLv-D2 | 711 | U.S. Pat. No. 8,734,809 SEQ ID NO: 97 |
| AAV CLv-D3 | 712 | U.S. Pat. No. 8,734,809 SEQ ID NO: 98 |
| AAV CLv-D4 | 713 | U.S. Pat. No. 8,734,809 SEQ ID NO: 99 |
| AAV CLv-D5 | 714 | U.S. Pat. No. 8,734,809 SEQ ID NO: 100 |
| AAV CLv-D6 | 715 | U.S. Pat. No. 8,734,809 SEQ ID NO: 101 |
| AAV CLv-D7 | 716 | U.S. Pat. No. 8,734,809 SEQ ID NO: 102 |
| AAV CLv-D8 | 717 | U.S. Pat. No. 8,734,809 SEQ ID NO: 103 |
| AAV CLv-E1 | 718 | U.S. Pat. No. 8,734,809 SEQ ID NO: 87 |
| AAV CLv-R1 | 719 | U.S. Pat. No. 8,734,809 SEQ ID NO: 104 |
| AAV CLv-R2 | 720 | U.S. Pat. No. 8,734,809 SEQ ID NO: 105 |
| AAV CLv-R3 | 721 | U.S. Pat. No. 8,734,809 SEQ ID NO: 106 |
| AAV CLv-R4 | 722 | U.S. Pat. No. 8,734,809 SEQ ID NO: 107 |
| AAV CLv-R5 | 723 | U.S. Pat. No. 8,734,809 SEQ ID NO: 108 |
| AAV CLv-R6 | 724 | U.S. Pat. No. 8,734,809 SEQ ID NO: 109 |
| AAV CLv-R7 | 725 | U.S. Pat. No. 8,734,809 SEQ ID NO: 110 |
| AAV CLv-R8 | 726 | U.S. Pat. No. 8,734,809 SEQ ID NO: 111 |
| AAV CLv-R9 | 727 | U.S. Pat. No. 8,734,809 SEQ ID NO: 112 |
| AAV CLg-F1 | 728 | U.S. Pat. No. 8,734,809 SEQ ID NO: 113 |
| AAV CLg-F2 | 729 | U.S. Pat. No. 8,734,809 SEQ ID NO: 114 |
| AAV CLg-F3 | 730 | U.S. Pat. No. 8,734,809 SEQ ID NO: 115 |
| AAV CLg-F4 | 731 | U.S. Pat. No. 8,734,809 SEQ ID NO: 116 |
| AAV CLg-F5 | 732 | U.S. Pat. No. 8,734,809 SEQ ID NO: 117 |
| AAV CLg-F6 | 733 | U.S. Pat. No. 8,734,809 SEQ ID NO: 117 |
| AAV CLg-F7 | 734 | U.S. Pat. No. 8,734,809 SEQ ID NO: 118 |
| AAV CLg-F8 | 735 | U.S. Pat. No. 8,734,809 SEQ ID NO: 117 |
| AAV CSp-1 | 736 | U.S. Pat. No. 8,734,809 SEQ ID NO: 119 |
| AAV CSp-10 | 737 | U.S. Pat. No. 8,734,809 SEQ ID NO: 120 |
| AAV CSp-11 | 738 | U.S. Pat. No. 8,734,809 SEQ ID NO: 121 |
| AAV CSp-2 | 739 | U.S. Pat. No. 8,734,809 SEQ ID NO: 122 |
| AAV CSp-3 | 740 | U.S. Pat. No. 8,734,809 SEQ ID NO: 123 |
| AAV CSp-4 | 741 | U.S. Pat. No. 8,734,809 SEQ ID NO: 124 |
| AAV CSp-6 | 742 | U.S. Pat. No. 8,734,809 SEQ ID NO: 125 |
| AAV CSp-7 | 743 | U.S. Pat. No. 8,734,809 SEQ ID NO: 126 |
| AAV CSp-8 | 744 | U.S. Pat. No. 8,734,809 SEQ ID NO: 127 |
| AAV CSp-9 | 745 | U.S. Pat. No. 8,734,809 SEQ ID NO: 128 |
| AAV CHt-2 | 746 | U.S. Pat. No. 8,734,809 SEQ ID NO: 129 |
| AAV CHt-3 | 747 | U.S. Pat. No. 8,734,809 SEQ ID NO: 130 |
| AAV CKd-1 | 748 | U.S. Pat. No. 8,734,809 SEQ ID NO: 131 |
| AAV CKd-10 | 749 | U.S. Pat. No. 8,734,809 SEQ ID NO: 132 |
| AAV CKd-2 | 750 | U.S. Pat. No. 8,734,809 SEQ ID NO: 133 |
| AAV CKd-3 | 751 | U.S. Pat. No. 8,734,809 SEQ ID NO: 134 |
| AAV CKd-4 | 752 | U.S. Pat. No. 8,734,809 SEQ ID NO: 135 |
| AAV CKd-6 | 753 | U.S. Pat. No. 8,734,809 SEQ ID NO: 136 |
| AAV CKd-7 | 754 | U.S. Pat. No. 8,734,809 SEQ ID NO: 137 |
| AAV CKd-8 | 755 | U.S. Pat. No. 8,734,809 SEQ ID NO: 138 |
| AAV CLv-1 | 756 | U.S. Pat. No. 8,734,809 SEQ ID NO: 139 |
| AAV CLv-12 | 757 | U.S. Pat. No. 8,734,809 SEQ ID NO: 140 |
| AAV CLv-13 | 758 | U.S. Pat. No. 8,734,809 SEQ ID NO: 141 |
| AAV CLv-2 | 759 | U.S. Pat. No. 8,734,809 SEQ ID NO: 142 |
| AAV CLv-3 | 760 | U.S. Pat. No. 8,734,809 SEQ ID NO: 143 |
| AAV CLv-4 | 761 | U.S. Pat. No. 8,734,809 SEQ ID NO: 144 |
| AAV CLv-6 | 762 | U.S. Pat. No. 8,734,809 SEQ ID NO: 145 |
| AAV CLv-8 | 763 | U.S. Pat. No. 8,734,809 SEQ ID NO: 146 |
| AAV CKd-B1 | 764 | U.S. Pat. No. 8,734,809 SEQ ID NO: 147 |
| AAV CKd-B2 | 765 | U.S. Pat. No. 8,734,809 SEQ ID NO: 148 |
| AAV CKd-B3 | 766 | U.S. Pat. No. 8,734,809 SEQ ID NO: 149 |
| AAV CKd-B4 | 767 | U.S. Pat. No. 8,734,809 SEQ ID NO: 150 |
| AAV CKd-B5 | 768 | U.S. Pat. No. 8,734,809 SEQ ID NO: 151 |
| AAV CKd-B6 | 769 | U.S. Pat. No. 8,734,809 SEQ ID NO: 152 |
| AAV CKd-B7 | 770 | U.S. Pat. No. 8,734,809 SEQ ID NO: 153 |
| AAV CKd-B8 | 771 | U.S. Pat. No. 8,734,809 SEQ ID NO: 154 |
| AAV CKd-H1 | 772 | U.S. Pat. No. 8,734,809 SEQ ID NO: 155 |
| AAV CKd-H2 | 773 | U.S. Pat. No. 8,734,809 SEQ ID NO: 156 |
| AAV CKd-H3 | 774 | U.S. Pat. No. 8,734,809 SEQ ID NO: 157 |
| AAV CKd-H4 | 775 | U.S. Pat. No. 8,734,809 SEQ ID NO: 158 |
| AAV CKd-H5 | 776 | U.S. Pat. No. 8,734,809 SEQ ID NO: 159 |
| AAV CKd-H6 | 777 | U.S. Pat. No. 8,734,809 SEQ ID NO: 151 |
| AAV CHt-1 | 778 | U.S. Pat. No. 8,734,809 SEQ ID NO: 160 |
| AAV CHt-P2 | 779 | WO2016065001 SEQ ID NO: 1 |
| AAV CHt-P5 | 780 | WO2016065001 SEQ ID NO: 2 |
| AAV CHt-P9 | 781 | WO2016065001 SEQ ID NO: 3 |
| AAV CBr-7.1 | 782 | WO2016065001 SEQ ID NO: 4 |
| AAV CBr-7.2 | 783 | WO2016065001 SEQ ID NO: 5 |
| AAV CBr-7.3 | 784 | WO2016065001 SEQ ID NO: 6 |
| AAV CBr-7.4 | 785 | WO2016065001 SEQ ID NO: 7 |
| AAV CBr-7.5 | 786 | WO2016065001 SEQ ID NO: 8 |
| AAV CBr-7.7 | 787 | WO2016065001 SEQ ID NO: 9 |
| AAV CBr-7.8 | 788 | WO2016065001 SEQ ID NO: 10 |
| AAV CBr-7.10 | 789 | WO2016065001 SEQ ID NO: 11 |
| AAV CKd-N3 | 790 | WO2016065001 SEQ ID NO: 12 |
| AAV CKd-N4 | 791 | WO2016065001 SEQ ID NO: 13 |
| AAV CKd-N9 | 792 | WO2016065001 SEQ ID NO: 14 |
| AAV CLv-L4 | 793 | WO2016065001 SEQ ID NO: 15 |
| AAV CLv-L5 | 794 | WO2016065001 SEQ ID NO: 16 |
| AAV CLv-L6 | 795 | WO2016065001 SEQ ID NO: 17 |
| AAV CLv-K1 | 796 | WO2016065001 SEQ ID NO: 18 |
| AAV CLv-K3 | 797 | WO2016065001 SEQ ID NO: 19 |
| AAV CLv-K6 | 798 | WO2016065001 SEQ ID NO: 20 |
| AAV CLv-M1 | 799 | WO2016065001 SEQ ID NO: 21 |
| AAV CLv-M11 | 800 | WO2016065001 SEQ ID NO: 22 |
| AAV CLv-M2 | 801 | WO2016065001 SEQ ID NO: 23 |
| AAV CLv-M5 | 802 | WO2016065001 SEQ ID NO: 24 |
| AAV CLv-M6 | 803 | WO2016065001 SEQ ID NO: 25 |
| AAV CLv-M7 | 804 | WO2016065001 SEQ ID NO: 26 |
| AAV CLv-M8 | 805 | WO2016065001 SEQ ID NO: 27 |
| AAV CLv-M9 | 806 | WO2016065001 SEQ ID NO: 28 |
| AAV CHt-P1 | 807 | WO2016065001 SEQ ID NO: 29 |
| AAV CHt-P6 | 808 | WO2016065001 SEQ ID NO: 30 |
| AAV CHt-P8 | 809 | WO2016065001 SEQ ID NO: 31 |
| AAV CHt-6.1 | 810 | WO2016065001 SEQ ID NO: 32 |
| AAV CHt-6.10 | 811 | WO2016065001 SEQ ID NO: 33 |
| AAV CHt-6.5 | 812 | WO2016065001 SEQ ID NO: 34 |
| AAV CHt-6.6 | 813 | WO2016065001 SEQ ID NO: 35 |
| AAV CHt-6.7 | 814 | WO2016065001 SEQ ID NO: 36 |
| AAV CHt-6.8 | 815 | WO2016065001 SEQ ID NO: 37 |
| AAV CSp-8.10 | 816 | WO2016065001 SEQ ID NO: 38 |
| AAV CSp-8.2 | 817 | WO2016065001 SEQ ID NO: 39 |
| AAV CSp-8.4 | 818 | WO2016065001 SEQ ID NO: 40 |
| AAV CSp-8.5 | 819 | WO2016065001 SEQ ID NO: 41 |
| AAV CSp-8.6 | 820 | WO2016065001 SEQ ID NO: 42 |
| AAV CSp-8.7 | 821 | WO2016065001 SEQ ID NO: 43 |
| AAV CSp-8.8 | 822 | WO2016065001 SEQ ID NO: 44 |
| AAV CSp-8.9 | 823 | WO2016065001 SEQ ID NO: 45 |
| AAV CBr-B7.3 | 824 | WO2016065001 SEQ ID NO: 46 |
| AAV CBr-B7.4 | 825 | WO2016065001 SEQ ID NO: 47 |
| AAV3B | 826 | WO2016065001 SEQ ID NO: 48 |
| AAV4 | 827 | WO2016065001 SEQ ID NO: 49 |
| AAV5 | 828 | WO2016065001 SEQ ID NO: 50 |
| AAV CHt-P2 | 829 | WO2016065001 SEQ ID NO: 51 |
| AAV CHt-P5 | 830 | WO2016065001 SEQ ID NO: 52 |
| AAV CHt-P9 | 831 | WO2016065001 SEQ ID NO: 53 |
| AAV CBr-7.1 | 832 | WO2016065001 SEQ ID NO: 54 |
| AAV CBr-7.2 | 833 | WO2016065001 SEQ ID NO: 55 |
| AAV CBr-7.3 | 834 | WO2016065001 SEQ ID NO: 56 |
| AAV CBr-7.4 | 835 | WO2016065001 SEQ ID NO: 57 |
| AAV CBr-7.5 | 836 | WO2016065001 SEQ ID NO: 58 |
| AAV CBr-7.7 | 837 | WO2016065001 SEQ ID NO: 59 |
| AAV CBr-7.8 | 838 | WO2016065001 SEQ ID NO: 60 |
| AAV CBr-7.10 | 839 | WO2016065001 SEQ ID NO: 61 |
| AAV CKd-N3 | 840 | WO2016065001 SEQ ID NO: 62 |
| AAV CK4-N4 | 841 | WO2016065001 SEQ ID NO: 63 |
| AAV CKd-N9 | 842 | WO2016065001 SEQ ID NO: 64 |
| AAV CLv-L4 | 843 | WO2016065001 SEQ ID NO: 65 |
| AAV CLv-L5 | 844 | WO2016065001 SEQ ID NO: 66 |
| AAV CLv-L6 | 845 | WO2016065001 SEQ ID NO: 67 |
| AAV CLv-K1 | 846 | WO2016065001 SEQ ID NO: 68 |
| AAV CLv-K3 | 847 | WO2016065001 SEQ ID NO: 69 |
| AAV CLv-K6 | 848 | WO2016065001 SEQ ID NO: 70 |
| AAV CLv-M1 | 849 | WO2016065001 SEQ ID NO: 71 |
| AAV CLv-M11 | 850 | WO2016065001 SEQ ID NO: 72 |
| AAV CLv-M2 | 851 | WO2016065001 SEQ ID NO: 73 |
| AAV CLv-M5 | 852 | WO2016065001 SEQ ID NO: 74 |
| AAV CLv-M6 | 853 | WO2016065001 SEQ ID NO: 75 |
| AAV CLv-M7 | 854 | WO2016065001 SEQ ID NO: 76 |
| AAV CLv-M8 | 855 | WO2016065001 SEQ ID NO: 77 |
| AAV CLv-M9 | 856 | WO2016065001 SEQ ID NO: 78 |
| AAV CHt-P1 | 857 | WO2016065001 SEQ ID NO: 79 |
| AAV CHt-P6 | 858 | WO2016065001 SEQ ID NO: 80 |
| AAV CHt-P8 | 859 | WO2016065001 SEQ ID NO: 81 |
| AAV CHt-6.1 | 860 | WO2016065001 SEQ ID NO: 82 |
| AAV CHt-6.10 | 861 | WO2016065001 SEQ ID NO: 83 |
| AAV CHt-6.5 | 862 | WO2016065001 SEQ ID NO: 84 |
| AAV CHt-6.6 | 863 | WO2016065001 SEQ ID NO: 85 |
| AAV CHt-6.7 | 864 | WO2016065001 SEQ ID NO: 86 |
| AAV CHt-6.8 | 865 | WO2016065001 SEQ ID NO: 87 |
| AAV CSp-8.10 | 866 | WO2016065001 SEQ ID NO: 88 |
| AAV CSp-8.2 | 867 | WO2016065001 SEQ ID NO: 89 |
| AAV CSp-8.4 | 868 | WO2016065001 SEQ ID NO: 90 |
| AAV CSp-8.5 | 869 | WO2016065001 SEQ ID NO: 91 |
| AAV CSp-8.6 | 870 | WO2016065001 SEQ ID NO: 92 |
| AAV CSp-8.7 | 871 | WO2016065001 SEQ ID NO: 93 |
| AAV CSp-8.8 | 872 | WO2016065001 SEQ ID NO: 94 |
| AAV CSp-8.9 | 873 | WO2016065001 SEQ ID NO: 95 |
| AAV CBr-B7.3 | 874 | WO2016065001 SEQ ID NO: 96 |
| AAV CBr-B7.4 | 875 | WO2016065001 SEQ ID NO: 97 |
| AAV3B | 876 | WO2016065001 SEQ ID NO: 98 |
| AAV4 | 877 | WO2016065001 SEQ ID NO: 99 |
| AAV5 | 878 | WO2016065001 SEQ ID NO: 100 |
| GPV | 879 | U.S. Pat. No. 9,624,274B2 SEQ ID NO: 192 |
| B19 | 880 | U.S. Pat. No. 9,624,274B2 SEQ ID NO: 193 |
| MVM | 881 | U.S. Pat. No. 9,624,274B2 SEQ ID NO: 194 |
| FPV | 882 | U.S. Pat. No. 9,624,274B2 SEQ ID NO: 195 |
| CPV | 883 | U.S. Pat. No. 9,624,274B2 SEQ ID NO: 196 |
| AAV6 | 884 | U.S. Pat. No. 9,546,112B2 SEQ ID NO: 5 |
| AAV6 | 885 | U.S. Pat. No. 9,457,103B2 SEQ ID NO: 1 |
| AAV2 | 886 | U.S. Pat. No. 9,457,103B2 SEQ ID NO: 2 |
| ShH10 | 887 | U.S. Pat. No. 9,457,103B2 SEQ ID NO: 3 |
| ShH13 | 888 | U.S. Pat. No. 9,457,103B2 SEQ ID NO: 4 |
| ShH10 | 889 | U.S. Pat. No. 9,457,103B2 SEQ ID NO: 5 |
| ShH10 | 890 | U.S. Pat. No. 9,457,103B2 SEQ ID NO: 6 |
| ShH10 | 891 | U.S. Pat. No. 9,457,103B2 SEQ ID NO: 7 |
| ShH10 | 892 | U.S. Pat. No. 9,457,103B2 SEQ ID NO: 8 |
| ShH10 | 893 | U.S. Pat. No. 9,457,103B2 SEQ ID NO: 9 |
| rh74 | 894 | U.S. Pat. No. 9,434,928B2 SEQ ID NO: 1, |
| | | US2015023924A1 SEQ ID NO: 2 |
| rh74 | 895 | U.S. Pat. No. 9,434,928B2 SEQ ID NO: 2, |
| | | US2015023924A1 SEQ ID NO: 1 |
| AAV8 | 896 | U.S. Pat. No. 9,434,928B2 SEQ ID NO: 4 |
| rh74 | 897 | U.S. Pat. No. 9,434,928B2 SEQ ID NO: 5 |
| rh74 (RHM4-1) | 898 | US2015023924A1 SEQ ID NO: 5, US20160375110A1 |
| | | SEQ ID NO: 4 |
| rh74 (RHM15-1) | 899 | US2015023924A1 SEQ ID NO: 6, US20160375110A1 |
| | | SEQ ID NO: 5 |
| rh74 (RHM15-2) | 900 | US2015023924A1 SEQ ID NO: 7, US20160375110A1 |
| | | SEQ ID NO: 6 |
| rh74 (RHM15-3/RHM15-5) | 901 | US2015023924A1 SEQ ID NO: 8, US20160375110A1 |
| | | SEQ ID NO: 7 |
| rh74 (RHM15-4) | 902 | US2015023924A1 SEQ ID NO: 9, US20160375110A1 |
| | | SEQ ID NO: 8 |
| rh74 (RHM15-6) | 903 | US2015023924A1 SEQ ID NO: 10, US20160375110A1 |
| | | SEQ ID NO: 9 |
| rh74 (RHM4-1) | 904 | US2015023924A1 SEQ ID NO: 11 |
| rh74 (RHM15-1) | 905 | US2015023924A1 SEQ ID NO: 12 |
| rh74 (RHM15-2) | 906 | US2015023924A1 SEQ ID NO: 13 |
| rh74 (RHM15-3/RHM15-5) | 907 | US2015023924A1 SEQ ID NO: 14 |
| rh74 (RHM15-4) | 908 | US2015023924A1 SEQ ID NO: 15 |
| rh74 (RHM15-6) | 909 | US2015023924A1 SEQ ID NO: 16 |
| AAV2 (comprising lung | 910 | US20160175389A1 SEQ ID NO: 9 |
| specific polypeptide) | | |
| AAV2 (comprising lung | 911 | US20160175389A1 SEQ ID NO: 10 |
| specific polypeptide) | | |
| Anc80 | 912 | US20170051257A1 SEQ ID NO: 1 |
| Anc80 | 913 | US20170051257A1 SEQ ID NO: 2 |
| Anc81 | 914 | US20170051257A1 SEQ ID NO: 3 |
| Anc80 | 915 | US20170051257A1 SEQ ID NO: 4 |
| Anc82 | 916 | US20170051257A1 SEQ ID NO: 5 |
| Anc82 | 917 | US20170051257A1 SEQ ID NO: 6 |
| Anc83 | 918 | US20170051257A1 SEQ ID NO: 7 |
| Anc83 | 919 | US20170051257A1 SEQ ID NO: 8 |
| Anc84 | 920 | US20170051257A1 SEQ ID NO: 9 |
| Anc84 | 921 | US20170051257A1 SEQ ID NO: 10 |
| Anc94 | 922 | US20170051257A1 SEQ ID NO: 11 |
| Anc94 | 923 | US20170051257A1 SEQ ID NO: 12 |
| Anc113 | 924 | US20170051257A1 SEQ ID NO: 13 |
| Anc113 | 925 | US20170051257A1 SEQ ID NO: 14 |
| Anc126 | 926 | US20170051257A1 SEQ ID NO: 15 |
| Anc126 | 927 | US20170051257A1 SEQ ID NO: 16 |
| Anc127 | 928 | US20170051257A1 SEQ ID NO: 17 |
| Anc127 | 929 | US20170051257A1 SEQ ID NO: 18 |
| Anc80L27 | 930 | US20170051257A1 SEQ ID NO: 19 |
| Anc80L59 | 931 | US20170051257A1 SEQ ID NO: 20 |
| Anc80L60 | 932 | US20170051257A1 SEQ ID NO: 21 |
| Anc80L62 | 933 | US20170051257A1 SEQ ID NO: 22 |
| Anc80L65 | 934 | US20170051257A1 SEQ ID NO: 23 |
| Anc80L33 | 935 | US20170051257A1 SEQ ID NO: 24 |
| Anc80L36 | 936 | US20170051257A1 SEQ ID NO: 25 |
| Anc80L44 | 937 | US20170051257A1 SEQ ID NO: 26 |
| Anc80L1 | 938 | US2017005I257A1 SEQ ID NO: 35 |
| Anc80L1 | 939 | US20170051257A1 SEQ ID NO: 36 |
| AAV-X1 | 940 | U.S. Pat. No. 8,283,151B2 SEQ ID NO: 11 |
| AAV-X1b | 941 | U.S. Pat. No. 8,283,151B2 SEQ ID NO: 12 |
| AAV-X5 | 942 | U.S. Pat. No. 8,283,151B2 SEQ ID NO: 13 |
| AAV-X19 | 943 | U.S. Pat. No. 8,283,151B2 SEQ ID NO: 14 |
| AAV-X21 | 944 | U.S. Pat. No. 8,283,151B2 SEQ ID NO: 15 |
| AAV-X22 | 945 | U.S. Pat. No. 8,283,151B2 SEQ ID NO: 16 |
| AAV-X23 | 946 | U.S. Pat. No. 8,283,151B2 SEQ ID NO: 17 |
| AAV-X24 | 947 | U.S. Pat. No. 8,283,151B2 SEQ ID NO: 18 |
| AAV-X25 | 948 | U.S. Pat. No. 8,283,151B2 SEQ ID NO: 19 |
| AAV-X26 | 949 | U.S. Pat. No. 8,283,151B2 SEQ ID NO: 20 |
| AAV-X1 | 950 | U.S. Pat. No. 8,283,151B2 SEQ ID NO: 21 |
| AAV-X1b | 951 | U.S. Pat. No. 8,283,151B2 SEQ ID NO: 22 |
| AAV-X5 | 952 | U.S. Pat. No. 8,283,151B2 SEQ ID NO: 23 |
| AAV-X19 | 953 | U.S. Pat. No. 8,283,151B2 SEQ ID NO: 24 |
| AAV-X21 | 954 | U.S. Pat. No. 8,283,151B2 SEQ ID NO: 25 |
| AAV-X22 | 955 | U.S. Pat. No. 8,283,151B2 SEQ ID NO: 26 |
| AAV-X23 | 956 | U.S. Pat. No. 8,283,151B2 SEQ ID NO: 27 |
| AAV-X24 | 957 | U.S. Pat. No. 8,283,151B2 SEQ ID NO: 28 |
| AAV-X25 | 958 | U.S. Pat. No. 8,283,151B2 SEQ ID NO: 29 |
| AAV-X26 | 959 | U.S. Pat. No. 8,283,151B2 SEQ ID NO: 30 |
| AAVrh8 | 960 | WO2016054554A1 SEQ ID NO: 8 |
| AAVrh8VP2FC5 | 961 | WO2016054554A1 SEQ ID NO: 9 |
| AAVrh8VP2FC44 | 962 | WO2016054554A1 SEQ ID NO: 10 |
| AAVrh8VP2ApoB100 | 963 | WO2016054554A1 SEQ ID NO: 11 |
| AAVrh8VP2RVG | 964 | WO2016054554A1 SEQ ID NO: 12 |
| AAVrh8VP2Angiopep-2 | 965 | WO2016054554A1 SEQ ID NO: 13 |
| VP2 | | |
| AAV9.47VP1.3 | 966 | WO2016054554A1 SEQ ID NO: 14 |
| AAV9.47VP2ICAMg3 | 967 | WO2016054554A1 SEQ ID NO: 15 |
| AAV9.47VP2RVG | 968 | WO2016054554A1 SEQ ID NO: 16 |
| AAV9.47VP2Angiopep-2 | 969 | WO2016054554A1 SEQ ID NO: 17 |
| AAV9.47VP2A-string | 970 | WO2016054554A1 SEQ ID NO: 18 |
| AAVrh8VP2FC5 VP2 | 971 | WO2016054554A1 SEQ ID NO: 19 |
| AAVrb8VP2FC44 VP2 | 972 | WO2016054554A1 SEQ ID NO: 20 |
| AAVrh8VP2ApoB100 VP2 | 973 | WO2016054554A1 SEQ ID NO: 21 |
| AAVrh8VP2RVG VP2 | 974 | WO2016054554A1 SEQ ID NO: 22 |
| AAVrh8VP2Angiopep-2 | 975 | WO2016054554A1 SEQ ID NO: 23 |
| VP2 | | |
| AAV9.47VP2ICAMg3 VP2 | 976 | WO2016054554A1 SEQ ID NO: 24 |
| AAV9.47VP2RVG VP2 | 977 | WO2016054554A1 SEQ ID NO: 25 |
| AAV9.47VP2Angiopep-2 | 978 | WO2016054554A1 SEQ ID NO: 26 |
| VP2 | | |
| AAV9.47VP2A-string VP2 | 979 | WO2016054554A1 SEQ ID NO: 27 |
| rAAV-B1 | 980 | WO2016054557A1 SEQ ID NO: 1 |
| rAAV-B2 | 981 | WO2016054557A1 SEQ ID NO: 2 |
| rAAV-B3 | 982 | WO2016054557A1 SEQ ID NO: 3 |
| rAAV-B4 | 983 | WO2016054557A1 SEQ ID NO: 4 |
| rAAV-B1 | 984 | WO2016054557A1 SEQ ID NO: 5 |
| rAAV-B2 | 985 | WO2016054557A1 SEQ ID NO: 6 |
| rAAV-B3 | 986 | WO2016054557A1 SEQ ID NO: 7 |
| rAAV-B4 | 987 | WO2016054557A1 SEQ ID NO: 8 |
| rAAV-L1 | 988 | WO2016054557A1 SEQ ID NO: 9 |
| rAAV-L2 | 989 | WO2016054557A1 SEQ ID NO: 10 |
| rAAV-L3 | 990 | WO2016054557A1 SEQ ID NO: 11 |
| rAAV-L4 | 991 | WO2016054557A1 SEQ ID NO: 12 |
| rAAV-L1 | 992 | WO2016054557A1 SEQ ID NO: 13 |
| rAAV-L2 | 993 | WO2016054557A1 SEQ ID NO: 14 |
| rAAV-L3 | 994 | WO2016054557A1 SEQ ID NO: 15 |
| rAAV-L4 | 995 | WO2016054557A1 SEQ ID NO: 16 |
| AAV9 | 996 | WO2016073739A1 SEQ ID NO: 3 |
| rAAV | 997 | WO2016081811A1 SEQ ID NO: 1 |
| rAAV | 998 | WO2016081811A1 SEQ ID NO: 2 |
| rAAV | 999 | WO2016081811A1 SEQ ID NO: 3 |
| rAAV | 1000 | WO2016081811A1 SEQ ID NO: 4 |
| rAAV | 1001 | WO2016081811A1 SEQ ID NO: 5 |
| rAAV | 1002 | WO2016081811A1 SEQ ID NO: 6 |
| rAAV | 1003 | WO2016081811A1 SEQ ID NO: 7 |
| rAAV | 1004 | WO2016081811A1 SEQ ID NO: 8 |
| rAAV | 1005 | WO2016081811A1 SEQ ID NO: 9 |
| rAAV | 1006 | WO2016081811A1 SEQ ID NO: 10 |
| rAAV | 1007 | WO2016081811A1 SEQ ID NO: 11 |
| rAAV | 1008 | WO2016081811A1 SEQ ID NO: 12 |
| rAAV | 1009 | WO2016081811A1 SEQ ID NO: 13 |
| rAAV | 1010 | WO2016081811A1 SEQ ID NO: 14 |
| rAAV | 1011 | WO2016081811A1 SEQ ID NO: 15 |
| rAAV | 1012 | WO2016081811A1 SEQ ID NO: 16 |
| rAAV | 1013 | WO2016081811A1 SEQ ID NO: 17 |
| rAAV | 1014 | WO2016081811A1 SEQ ID NO: 18 |
| rAAV | 1015 | WO2016081811A1 SEQ ID NO: 19 |
| rAAV | 1016 | WO2016081811A1 SEQ ID NO: 20 |
| rAAV | 1017 | WO2016081811A1 SEQ ID NO: 21 |
| rAAV | 1018 | WO2016081811A1 SEQ ID NO: 22 |
| rAAV | 1019 | WO2016081811A1 SEQ ID NO: 23 |
| rAAV | 1020 | WO2016081811A1 SEQ ID NO: 24 |
| rAAV | 1021 | WO2016081811A1 SEQ ID NO: 25 |
| rAAV | 1022 | WO2016081811A1 SEQ ID NO: 26 |
| rAAV | 1023 | WO2016081811A1 SEQ ID NO: 27 |
| rAAV | 1024 | WO2016081811A1 SEQ ID NO: 28 |
| rAAV | 1025 | WO2016081811A1 SEQ ID NO: 29 |
| rAAV | 1026 | WO2016081811A1 SEQ ID NO: 30 |
| rAAV | 1027 | WO2016081811A1 SEQ ID NO: 31 |
| rAAV | 1028 | WO2016081811A1 SEQ ID NO: 32 |
| rAAV | 1029 | WO2016081811A1 SEQ ID NO: 33 |
| rAAV | 1030 | WO2016081811A1 SEQ ID NO: 34 |
| rAAV | 1031 | WO2016081811A1 SEQ ID NO: 35 |
| rAAV | 1032 | WO2016081811A1 SEQ ID NO: 36 |
| rAAV | 1033 | WO2016081811A1 SEQ ID NO: 37 |
| rAAV | 1034 | WO2016081811A1 SEQ ID NO: 38 |
| rAAV | 1035 | WO2016081811A1 SEQ ID NO: 39 |
| rAAV | 1036 | WO2016081811A1 SEQ ID NO: 40 |
| rAAV | 1037 | WO2016081811A1 SEQ ID NO: 41 |
| rAAV | 1038 | WO2016081811A1 SEQ ID NO: 42 |
| rAAV | 1039 | WO2016081811A1 SEQ ID NO: 43 |
| rAAV | 1040 | WO2016081811A1 SEQ ID NO: 44 |
| rAAV | 1041 | WO201608I811A1 SEQ ID NO: 45 |
| rAAV | 1042 | WO2016081811A1 SEQ ID NO: 46 |
| rAAV | 1043 | WO2016081811A1 SEQ ID NO: 47 |
| rAAV | 1044 | WO2016081811A1 SEQ ID NO: 48 |
| rAAV | 1045 | WO2016081811A1 SEQ ID NO: 49 |
| rAAV | 1046 | WO2016081811A1 SEQ ID NO: 50 |
| rAAV | 1047 | WO2016081811A1 SEQ ID NO: 51 |
| rAAV | 1048 | WO2016081811A1 SEQ ID NO: 52 |
| rAAV | 1049 | WO2016081811A1 SEQ ID NO: 53 |
| rAAV | 1050 | WO2016081811A1 SEQ ID NO: 54 |
| rAAV | 1051 | WO2016081811A1 SEQ ID NO: 55 |
| rAAV | 1052 | WO2016081811A1 SEQ ID NO: 56 |
| rAAV | 1053 | WO2016081811A1 SEQ ID NO: 57 |
| rAAV | 1054 | WO2016081811A1 SEQ ID NO: 58 |
| rAAV | 1055 | WO2016081811A1 SEQ ID NO: 59 |
| rAAV | 1056 | WO2016081811A1 SEQ ID NO: 60 |
| rAAV | 1057 | WO2016081811A1 SEQ ID NO: 61 |
| rAAV | 1058 | WO2016081811A1 SEQ ID NO: 62 |
| rAAV | 1059 | WO2016081811A1 SEQ ID NO: 63 |
| rAAV | 1060 | WO2016081811A1 SEQ ID NO: 64 |
| rAAV | 1061 | WO2016081811A1 SEQ ID NO: 65 |
| rAAV | 1062 | WO2016081811A1 SEQ ID NO: 66 |
| rAAV | 1063 | WO2016081811A1 SEQ ID NO: 67 |
| rAAV | 1064 | WO2016081811A1 SEQ ID NO: 68 |
| rAAV | 1065 | WO2016081811A1 SEQ ID NO: 69 |
| rAAV | 1066 | WO2016081811A1 SEQ ID NO: 70 |
| rAAV | 1067 | WO2016081811A1 SEQ ID NO: 71 |
| rAAV | 1068 | WO2016081811A1 SEQ ID NO: 72 |
| rAAV | 1069 | WO2016081811A1 SEQ ID NO: 73 |
| rAAV | 1070 | WO2016081811A1 SEQ ID NO: 74 |
| rAAV | 1071 | WO2016081811A1 SEQ ID NO: 75 |
| rAAV | 1072 | WO2016081811A1 SEQ ID NO: 76 |
| rAAV | 1073 | WO2016081811A1 SEQ ID NO: 77 |
| rAAV | 1074 | WO2016081811A1 SEQ ID NO: 78 |
| rAAV | 1075 | WO2016081811A1 SEQ ID NO: 79 |
| rAAV | 1076 | WO2016081811A1 SEQ ID NO: 80 |
| rAAV | 1077 | WO2016081811A1 SEQ ID NO: 81 |
| rAAV | 1078 | WO2016081811A1 SEQ ID NO: 82 |
| rAAV | 1079 | WO2016081811A1 SEQ ID NO: 83 |
| rAAV | 1080 | WO2016081811A1 SEQ ID NO: 84 |
| rAAV | 1081 | WO2016081811A1 SEQ ID NO: 85 |
| rAAV | 1082 | WO2016081811A1 SEQ ID NO: 86 |
| rAAV | 1083 | WO2016081811A1 SEQ ID NO: 87 |
| rAAV | 1084 | WO2016081811A1 SEQ ID NO: 88 |
| rAAV | 1085 | WO2016081811A1 SEQ ID NO: 89 |
| rAAV | 1086 | WO2016081811A1 SEQ ID NO: 90 |
| rAAV | 1087 | WO2016081811A1 SEQ ID NO: 91 |
| rAAV | 1088 | WO2016081811A1 SEQ ID NO: 92 |
| rAAV | 1089 | WO2016081811A1 SEQ ID NO: 93 |
| rAAV | 1090 | WO2016081811A1 SEQ ID NO: 94 |
| rAAV | 1091 | WO2016081811A1 SEQ ID NO: 95 |
| rAAV | 1092 | WO2016081811A1 SEQ ID NO: 96 |
| rAAV | 1093 | WO2016081811A1 SEQ ID NO: 97 |
| rAAV | 1094 | WO2016081811A1 SEQ ID NO: 98 |
| rAAV | 1095 | WO2016081811A1 SEQ ID NO: 99 |
| rAAV | 1096 | WO2016081811A1 SEQ ID NO: 100 |
| rAAV | 1097 | WO2016081811A1 SEQ ID NO: 101 |
| rAAV | 1098 | WO2016081811A1 SEQ ID NO: 102 |
| rAAV | 1099 | WO2016081811A1 SEQ ID NO: 103 |
| rAAV | 1100 | WO2016081811A1 SEQ ID NO: 104 |
| rAAV | 1101 | WO2016081811A1 SEQ ID NO: 105 |
| rAAV | 1102 | WO2016081811A1 SEQ ID NO: 106 |
| rAAV | 1103 | WO2016081811A1 SEQ ID NO: 107 |
| rAAV | 1104 | WO2016081811A1 SEQ ID NO: 108 |
| rAAV | 1105 | WO2016081811A1 SEQ ID NO: 109 |
| rAAV | 1106 | WO2016081811A1 SEQ ID NO: 110 |
| rAAV | 1107 | WO2016081811A1 SEQ ID NO: 111 |
| rAAV | 1108 | WO2016081811A1 SEQ ID NO: 112 |
| rAAV | 1109 | WO2016081811A1 SEQ ID NO: 113 |
| rAAV | 1110 | WO2016081811A1 SEQ ID NO: 114 |
| rAAV | 1111 | WO2016081811A1 SEQ ID NO: 115 |
| rAAV | 1112 | WO2016081811A1 SEQ ID NO: 116 |
| rAAV | 1113 | WO2016081811A1 SEQ ID NO: 117 |
| rAAV | 1114 | WO2016081811A1 SEQ ID NO: 118 |
| rAAV | 1115 | WO2016081811A1 SEQ ID NO: 119 |
| rAAV | 1116 | WO2016081811A1 SEQ ID NO: 120 |
| rAAV | 1117 | WO2016081811A1 SEQ ID NO: 121 |
| rAAV | 1118 | WO2016081811A1 SEQ ID NO: 122 |
| rAAV | 1119 | WO2016081811A1 SEQ ID NO: 123 |
| rAAV | 1120 | WO2016081811A1 SEQ ID NO: 124 |
| rAAV | 1121 | WO2016081811A1 SEQ ID NO: 125 |
| rAAV | 1122 | WO2016081811A1 SEQ ID NO: 126 |
| rAAV | 1123 | WO2016081811A1 SEQ ID NO: 127 |
| rAAV | 1124 | WO2016081811A1 SEQ ID NO: 128 |
| AAV8 E532K | 1125 | WO2016081811A1 SEQ ID NO: 133 |
| AAV8 E532K | 1126 | WO2016081811A1 SEQ ID NO: 134 |
| rAAV4 | 1127 | WO2016115382A1 SEQ ID NO: 2 |
| rAAV4 | 1128 | WO2016115382A1 SEQ ID NO: 3 |
| rAAV4 | 1129 | WO2016115382A1 SEQ ID NO: 4 |
| rAAV4 | 1130 | WO2016115382A1 SEQ ID NO: 5 |
| rAAV4 | 1131 | WO2016115382A1 SEQ ID NO: 6 |
| rAAV4 | 1132 | WO2016115382A1 SEQ ID NO: 7 |
| rAAV4 | 1133 | WO2016115382A1 SEQ ID NO: 8 |
| rAAV4 | 1134 | WO2016115382A1 SEQ ID NO: 9 |
| rAAV4 | 1135 | WO2016115382A1 SEQ ID NO: 10 |
| rAAV4 | 1136 | WO2016115382A1 SEQ ID NO: 11 |
| rAAV4 | 1137 | WO2016115382A1 SEQ ID NO: 12 |
| rAAV4 | 1138 | WO2016115382A1 SEQ ID NO: 13 |
| rAAV4 | 1139 | WO2016115382A1 SEQ ID NO: 14 |
| rAAV4 | 1140 | WO2016115382A1 SEQ ID NO: 15 |
| rAAV4 | 1141 | WO2016115382A1 SEQ ID NO: 16 |
| rAAV4 | 1142 | WO2016115382A1 SEQ ID NO: 17 |
| rAAV4 | 1143 | WO2016115382A1 SEQ ID NO: 18 |
| rAAV4 | 1144 | WO2016115382A1 SEQ ID NO: 19 |
| rAAV4 | 1145 | WO2016115382A1 SEQ ID NO: 20 |
| rAAV4 | 1146 | WO2016115382A1 SEQ ID NO: 21 |
| AAV11 | 1147 | WO2016115382A1 SEQ ID NO: 22 |
| AAV12 | 1148 | WO2016115382A1 SEQ ID NO: 23 |
| rh32 | 1149 | WO2016115382A1 SEQ ID NO: 25 |
| rh33 | 1150 | WO2016115382A1 SEQ ID NO: 26 |
| rh34 | 1151 | WO2016115382A1 SEQ ID NO: 27 |
| rAAV4 | 1152 | WO2016115382A1 SEQ ID NO: 28 |
| rAAV4 | 1153 | WO2016115382A1 SEQ ID NO: 29 |
| rAAV4 | 1154 | WO2016115382A1 SEQ ID NO: 30 |
| rAAV4 | 1155 | WO2016115382A1 SEQ ID NO: 31 |
| rAAV4 | 1156 | WO2016115382A1 SEQ ID NO: 32 |
| rAAV4 | 1157 | WO2016115382A1 SEQ ID NO: 33 |
| AAV2/8 | 1158 | WO2016131981A1 SEQ ID NO: 47 |
| AAV2/8 | 1159 | WO2016131981A1 SEQ ID NO: 48 |
| ancestral AAV | 1160 | WO2016154344A1 SEQ ID NO: 7 |
| ancestral AAV variant C4 | 1161 | WO2016154344A1 SEQ ID NO: 13 |
| ancestral AAV variant C7 | 1162 | WO2016154344A1 SEQ ID NO: 14 |
| ancestral AAV variant G4 | 1163 | WO2016154344A1 SEQ ID NO: 15 |
| consensus amino acid | 1164 | WO2016154344A1 SEQ ID NO: 16 |
| sequence of ancestral AAV | | |
| variants, C4, C7 and G4 | | |
| consensus amino acid | 1165 | WO2016154344A1 SEQ ID NO: 17 |
| sequence of ancestral AAV | | |
| variants, C4 and C7 | | |
| AAV8 (with a AAV2 | 1166 | WO2016150403A1 SEQ ID NO: 13 |
| phospholipase domain) | | |
| AAV VR-942n | 1167 | US20160289275A1 SEQ ID NO: 10 |
| AAV5-A (M569V) | 1168 | US20160289275A1 SEQ ID NO: 13 |
| AAV5-A (M569V) | 1169 | US20160289275A1 SEQ ID NO: 14 |
| AAV5-A (Y585V) | 1170 | US20160289275A1 SEQ ID NO: 16 |
| AAV5-A (Y585V) | 1171 | US20160289275A1 SEQ ID NO: 17 |
| AAV5-A (L587T) | 1172 | US20160289275A1 SEQ ID NO: 19 |
| AAV5-A (L587T) | 1173 | US20160289275A1 SEQ ID NO: 20 |
| AAV5-A (Y585V/L587T) | 1174 | US20160289275A1 SEQ ID NO: 22 |
| AAV5-A (Y585V/L587T) | 1175 | US20160289275A1 SEQ ID NO: 23 |
| AAV5-B (D652A) | 1176 | US20160289275A1 SEQ ID NO: 25 |
| AAV5-B (D652A) | 1177 | US20160289275A1 SEQ ID NO: 26 |
| AAV5-B (T362M) | 1178 | US20160289275A1 SEQ ID NO: 28 |
| AAV5-B (T362M) | 1179 | US20160289275A1 SEQ ID NO: 29 |
| AAV5-B (Q359D) | 1180 | US20160289275A1 SEQ ID NO: 31 |
| AAV5-B (Q359D) | 1181 | US20160289275A1 SEQ ID NO: 32 |
| AAV5-B (E350Q) | 1182 | US20160289275A1 SEQ ID NO: 34 |
| AAV5-B (E350Q) | 1183 | US20160289275A1 SEQ ID NO: 35 |
| AAV5-B (P533S) | 1184 | US20160289275A1 SEQ ID NO: 37 |
| AAV5-B (P533S) | 1185 | US20160289275A1 SEQ ID NO: 38 |
| AAV5-B (P533G) | 1186 | US20160289275A1 SEQ ID NO: 40 |
| AAV5-B (P533G) | 1187 | US20160289275A1 SEQ ID NO: 41 |
| AAV5-mutation in loop VII | 1188 | US20160289275A1 SEQ ID NO: 43 |
| AAV5-mutation in loop VII | 1189 | US20160289275A1 SEQ ID NO: 44 |
| AAV8 | 1190 | US20160289275A1 SEQ ID NO: 47 |
| Mut A (LK03/AAV8) | 1191 | WO2016181123A1 SEQ ID NO: 1 |
| Mut B (LK03/AAV5) | 1192 | WO2016181123A1 SEQ ID NO: 2 |
| Mut C (AAV8/AAV3B) | 1193 | WO2016181123A1 SEQ ID NO: 3 |
| Mut D (AAV5/AAV3B) | 1194 | WO2016181123A1 SEQ ID NO: 4 |
| Mut E (AAV8/AAV3B) | 1195 | WO2016181123A1 SEQ ID NO: 5 |
| Mut F (AAV3B/AAV8) | 1196 | WO2016181123A1 SEQ ID NO: 6 |
| AAV44.9 | 1197 | WO2016183297A1 SEQ ID NO: 4 |
| AAV44.9 | 1198 | WO2016183297A1 SEQ ID NO: 5 |
| AAVrh8 | 1199 | WO2016183297A1 SEQ ID NO: 6 |
| AAV44.9 (S470N) | 1200 | WO2016183297A1 SEQ ID NO: 9 |
| rh74 VP1 | 1201 | US20160375110A1 SEQ ID NO: 1 |
| AAV-LK03 (L125I) | 1202 | WO2017015102A1 SEQ ID NO: 5 |
| AAV3B (S663V + T492V) | 1203 | WO2017015102A1 SEQ ID NO: 6 |
| Anc80 | 1204 | WO2017019994A2 SEQ ID NO: 1 |
| Anc80 | 1205 | WO2017019994A2 SEQ ID NO: 2 |
| Anc81 | 1206 | WO2017019994A2 SEQ ID NO: 3 |
| Anc81 | 1207 | WO2017019994A2 SEQ ID NO: 4 |
| Anc82 | 1208 | WO2017019994A2 SEQ ID NO: 5 |
| Anc82 | 1209 | WO2017019994A2 SEQ ID NO: 6 |
| Anc83 | 1210 | WO2017019994A2 SEQ ID NO: 7 |
| Anc83 | 1211 | WO2017019994A2 SEQ ID NO: 8 |
| Anc84 | 1212 | WO2017019994A2 SEQ ID NO: 9 |
| Anc84 | 1213 | WO2017019994A2 SEQ ID NO: 10 |
| Anc94 | 1214 | WO2017019994A2 SEQ ID NO: 11 |
| Anc94 | 1215 | WO2017019994A2 SEQ ID NO: 12 |
| Anc113 | 1216 | WO2017019994A2 SEQ ID NO: 13 |
| Anc113 | 1217 | WO2017019994A2 SEQ ID NO: 14 |
| Anc126 | 1218 | WO2017019994A2 SEQ ID NO: 15 |
| Anc126 | 1219 | WO2017019994A2 SEQ ID NO: 16 |
| Anc127 | 1220 | WO2017019994A2 SEQ ID NO: 17 |
| Anc127 | 1221 | WO2017019994A2 SEQ ID NO: 18 |
| Anc80L27 | 1222 | WO2017019994A2 SEQ ID NO: 19 |
| Anc80L59 | 1223 | WO2017019994A2 SEQ ID NO: 20 |
| Anc80L60 | 1224 | WO2017019994A2 SEQ ID NO: 21 |
| Anc80L62 | 1225 | WO2017019994A2 SEQ ID NO: 22 |
| Anc80L65 | 1226 | WO2017019994A2 SEQ ID NO: 23 |
| Anc80L33 | 1227 | WO2017019994A2 SEQ ID NO: 24 |
| Anc80L36 | 1228 | WO2017019994A2 SEQ ID NO: 25 |
| Anc80L44 | 1229 | WO2017019994A2 SEQ ID NO: 26 |
| Anc80L1 | 1230 | WO2017019994A2 SEQ ID NO: 35 |
| Anc80L1 | 1231 | WO2017019994A2 SEQ ID NO: 36 |
| AAVrh10 | 1232 | WO2017019994A2 SEQ ID NO: 41 |
| Anc110 | 1233 | WO2017019994A2 SEQ ID NO: 42 |
| Anc110 | 1234 | WO2017019994A2 SEQ ID NO: 43 |
| AAVrh32.33 | 1235 | WO2017019994A2 SEQ ID NO: 45 |
| AAVrh74 | 1236 | WO2017049031A1 SEQ ID NO: 1 |
| AAV2 | 1237 | WO2017053629A2 SEQ ID NO: 49 |
| AAV2 | 1238 | WO2017053629A2 SEQ ID NO: 50 |
| AAV2 | 1239 | WO2017053629A2 SEQ ID NO: 82 |
| Parvo-like virus | 1240 | WO2017070476A2 SEQ ID NO: 1 |
| Parvo-like virus | 1241 | WO2017070476A2 SEQ ID NO: 2 |
| Parvo-like virus | 1242 | WO2017070476A2 SEQ ID NO: 3 |
| Parvo-like virus | 1243 | WO2017070476A2 SEQ ID NO: 4 |
| Parvo-like virus | 1244 | WO2017070476A2 SEQ ID NO: 5 |
| Parvo-like virus | 1245 | WO2017070476A2 SEQ ID NO: 6 |
| AAVrh.10 | 1246 | WO2017070516A1 SEQ ID NO: 7 |
| AAVrh.10 | 1247 | WO2017070516A1 SEQ ID NO: 14 |
| AAV2tYF | 1248 | WO2017070491A1 SEQ ID NO: 1 |
| AAV-SPK | 1249 | WO2017075619A1 SEQ ID NO: 28 |
| AAV2.5 | 1250 | US20170128528A1 SEQ ID NO: 13 |
| AAV1.1 | 1251 | US20170128528A1 SEQ ID NO: 15 |
| AAV6.1 | 1252 | US20170128528A1 SEQ ID NO: 17 |
| AAV6.3.1 | 1253 | US20170128528A1 SEQ ID NO: 18 |
| AAV2i8 | 1254 | US20170128528A1 SEQ ID NO: 28 |
| AAV2i8 | 1255 | US20170128528A1 SEQ ID NO: 29 |
| ttAAV | 1256 | US20170128528A1 SEQ ID NO: 30 |
| MAAV-S312N | 1257 | US20170128528A1 SEQ ID NO: 32 |
| ttAAV-S312N | 1258 | US20170128528A1 SEQ ID NO: 33 |
| AAV6 (Y705, Y731, | 1259 | WO2016134337A1 SEQ ID NO: 24 |
| and T492) | | |
| AAV2 | 1260 | WO2016134375A1 SEQ ID NO: 9 |
| AAV2 | 1261 | WO2016134375A1 SEQ ID NO: 10 |

[0228] In some embodiments, the AAV serotype may be, or may have a sequence as described in International Patent Publication WO2015038958, the contents of which are herein incorporated by reference in their entirety, such as, but not limited to, AAV9 (SEQ ID NO: 2 and 11 of WO2015038958 or SEQ ID NO: 137 and 138 respectively herein), PHP.B (SEQ ID NO: 8 and 9 of WO2015038958, herein SEQ ID NO: 5 and 6), G2B-13 (SEQ ID NO: 12 of WO2015038958, herein SEQ ID NO: 7), G2B-26 (SEQ ID NO: 13 of WO2015038958, herein SEQ ID NO: 5), TH1.1-32 (SEQ ID NO: 14 of WO2015038958, herein SEQ ID NO: 8), TH1.1-35 (SEQ ID NO: 15 of WO2015038958, herein SEQ ID NO: 9) or variants thereof. Further, any of the targeting peptides or amino acid inserts described in WO2015038958, may be inserted into any parent AAV serotype, such as, but not limited to, AAV9 (SEQ ID NO: 137 for the DNA sequence and SEQ ID NO: 138 for the amino acid sequence). In some embodiments, the amino acid insert is inserted between amino acids 586-592 of the parent AAV (e.g., AAV9). In another embodiment, the amino acid insert is inserted between amino acids 588-589 of the parent AAV sequence. The amino acid insert may be, but is not limited to, any of the following amino acid sequences, TLAVPFK (SEQ ID NO: 1 of WO2015038958; herein SEQ ID NO: 1262), KFPVALT (SEQ ID NO: 3 of WO2015038958; herein SEQ ID NO: 1263), LAVPFK (SEQ ID NO: 31 of WO2015038958; herein SEQ ID NO: 1264), AVPFK (SEQ ID NO: 32 of WO2015038958; herein SEQ ID NO: 1265), VPFK (SEQ ID NO: 33 of WO2015038958; herein SEQ ID NO: 1266), TLAVPF (SEQ ID NO: 34 of WO2015038958; herein SEQ ID NO: 1267), TLAVP (SEQ ID NO: 35 of WO2015038958; herein SEQ ID NO: 1268), TLAV (SEQ ID NO: 36 of WO2015038958; herein SEQ ID NO: 1269), SVSKPFL (SEQ ID NO: 28 of WO2015038958; herein SEQ ID NO: 1270), FTLTTPK (SEQ ID NO: 29 of WO2015038958; herein SEQ ID NO: 1271), MNATKNV (SEQ ID NO: 30 of WO2015038958; herein SEQ ID NO: 1272), QSSQTPR (SEQ ID NO: 54 of WO2015038958; herein SEQ ID NO: 1273), ILGTGTS (SEQ ID NO: 55 of WO2015038958; herein SEQ ID NO: 1274), TRTNPEA (SEQ ID NO: 56 of WO2015038958; herein SEQ ID NO: 1275), NGGTSSS (SEQ ID NO: 58 of WO2015038958; herein SEQ ID NO: 1276), or YTLSQGW (SEQ ID NO: 60 of WO2015038958; herein SEQ ID NO: 1277). Non-limiting examples of nucleotide sequences that may encode the amino acid inserts include the following, AAGTTTCCTGTGGCGTTGACT (for SEQ ID NO: 3 of WO2015038958; herein SEQ ID NO: 1278), ACTTGGCGGTGCCTTTTAAG (SEQ ID NO: 24 and 49 of WO2015038958; herein SEQ ID NO: 1279), AGTGTGAGTAAGCCTTTTG (SEQ ID NO: 25 of WO2015038958; herein SEQ ID NO: 1280), TTACGTTGACGACGCCTAAG (SEQ ID NO: 26 of WO2015038958; herein SEQ ID NO: 1281), ATGAATGCTACGAAGAATGTG (SEQ ID NO: 27 of WO2015038958; herein SEQ ID NO: 1282), CAGTCGTCGCAGACGCCTAGG (SEQ ID NO: 48 of WO2015038958; herein SEQ ID NO: 1283), ATTCTGGGGACTGGTACTTCG (SEQ ID NO: 50 and 52 of WO2015038958; herein SEQ ID NO: 1284), ACGCGGACTAATCCTGAGGCT (SEQ ID NO: 51 of WO2015038958; herein SEQ ID NO: 1285), AATGGGGGGACTAGTAGTTCT (SEQ ID NO: 53 of WO2015038958; herein SEQ ID NO: 1286), or TATACTTTGTCGCAGGGTTGG (SEQ ID NO: 59 of WO2015038958; herein SEQ ID NO: 1287).

[0229] In some embodiments, the AAV serotype may be, or may have a sequence as described in International Patent Publication WO2017100671, the contents of which are herein incorporated by reference in their entirety, such as, but not limited to, AAV9 (SEQ ID NO: 45 of WO2017100671, herein SEQ ID NO: 11), PHP.N (SEQ ID NO: 46 of WO2017100671, herein SEQ ID NO: 4), PHP.S (SEQ ID NO: 47 of WO2017100671, herein SEQ ID NO: 10), or variants thereof. Further, any of the targeting peptides or amino acid inserts described in WO2017100671 may be inserted into any parent AAV serotype, such as, but not limited to, AAV9. In some embodiments, the amino acid insert is inserted between amino acids 586-592 of the parent AAV (e.g., AAV9). In another embodiment, the amino acid insert is inserted between amino acids 588-589 of the parent AAV sequence. The amino acid insert may be, but is not limited to, any of the following amino acid sequences. AQTLAVPFKAQ (SEQ ID NO: 1 of WO2017100671; herein SEQ ID NO: 1288), AQSVSKPFLAQ (SEQ ID NO: 2 of WO2017100671; herein SEQ ID NO: 1289), AQFTLTTPKAQ (SEQ ID NO: 3 in the sequence listing of WO2017100671; herein SEQ ID NO: 1290), DGTLAVPFKAQ (SEQ ID NO: 4 in the sequence listing of WO2017100671; herein SEQ ID NO: 1291), ESTLAVPFKAQ (SEQ ID NO: 5 of WO2017100671; herein SEQ ID NO: 1292), GGTLAVPFKAQ (SEQ ID NO: 6 of WO2017100671; herein SEQ ID NO: 1293), AQTLATPFKAQ (SEQ ID NO: 7 and 33 of WO2017100671; herein SEQ ID NO: 1294), ATTLATPFKAQ (SEQ ID NO: 8 of WO2017100671; herein SEQ ID NO: 1295), DGTLATPFKAQ (SEQ ID NO: 9 of WO2017100671; herein SEQ ID NO: 1296), GGTLATPFKAQ (SEQ ID NO: 10 of WO2017100671; herein SEQ ID NO: 1297), SGSLAVPFKAQ (SEQ ID NO: 11 of WO2017100671; herein SEQ ID NO: 1298), AQTLAQPFKAQ (SEQ ID NO: 12 of WO2017100671; herein SEQ ID NO: 1299), AQTLQQPFKAQ (SEQ ID NO: 13 of WO2017100671; herein SEQ ID NO: 1300), AQTLSNPFKAQ (SEQ ID NO: 14 of WO2017100671; herein SEQ ID NO: 1301), AQTLAVPFSNP (SEQ ID NO: 15 of WO2017100671; herein SEQ ID NO: 1302), QGTLAVPFKAQ (SEQ ID NO: 16 of WO2017100671; herein SEQ ID NO: 1303), NQTLAVPFKAQ (SEQ ID NO: 17 of WO2017100671; herein SEQ ID NO: 1304), EGSLAVPFKAQ (SEQ ID NO: 18 of WO2017100671; herein SEQ ID NO: 1305), SGNLAVPFKAQ (SEQ ID NO: 19 of WO2017100671; herein SEQ ID NO: 1306), EGTLAVPFKAQ (SEQ ID NO: 20 of WO2017100671; herein SEQ ID NO: 1307), DSTLAVPFKAQ (SEQ ID NO: 21 in Table 1 of WO2017100671; herein SEQ ID NO: 1308), AVTLAVPFKAQ (SEQ ID NO: 22 of WO2017100671; herein SEQ ID NO: 1309), AQTLSTPFKAQ (SEQ ID NO: 23 of WO2017100671; herein SEQ ID NO: 1310), AQTLPQPFKAQ (SEQ ID NO: 24 and 32 of WO2017100671; herein SEQ ID NO: 1311), AQTLSQPFKAQ (SEQ ID NO: 25 of WO2017100671; herein SEQ ID NO: 1312), AQTLQLPFKAQ (SEQ ID NO: 26 of WO2017100671; herein SEQ ID NO: 1313), AQTLTMPFKAQ (SEQ ID NO: 27, and 34 of WO2017100671 and SEQ ID NO: 35 in the sequence listing of WO2017100671; herein SEQ ID NO: 1314), AQTLTTPFKAQ (SEQ ID NO: 28 of WO2017100671; herein SEQ ID NO: 1315), AQYTLSQGWAQ (SEQ ID NO: 29 of WO2017100671; herein SEQ ID NO: 1316), AQMNATKNVAQ (SEQ ID NO: 30 of WO2017100671; herein SEQ ID NO: 1317), AQVSGGHHSAQ (SEQ ID NO: 31 of WO2017100671; herein SEQ ID NO: 1318), AQTLTAPFKAQ (SEQ ID NO: 35 in Table 1 of WO2017100671; herein SEQ ID NO: 1319), AQTLSKPFKAQ (SEQ ID NO: 36 of WO2017100671; herein SEQ ID NO: 1320), QAVRTSL (SEQ ID NO: 37 of WO2017100671; herein SEQ ID NO: 1321), YTLSQGW (SEQ ID NO: 38 of WO2017100671; herein SEQ ID NO: 1277), LAKERLS (SEQ ID NO: 39 of WO2017100671; herein SEQ ID NO: 1322), TLAVPFK (SEQ ID NO: 40 in the sequence listing of WO2017100671; herein SEQ ID NO: 1262), SVSKPFL (SEQ ID NO: 41 of WO2017100671; herein SEQ ID NO: 1270), FTLTTPK (SEQ ID NO: 42 of WO2017100671; herein SEQ ID NO: 1271), MNSTKNV (SEQ ID NO: 43 of WO2017100671; herein SEQ ID NO: 1323), VSGGHHS (SEQ ID NO: 44 of WO2017100671; herein SEQ ID NO: 1324), SAQTLAVPFKAQAQ (SEQ ID NO: 48 of WO2017100671; herein SEQ ID NO: 1325), SXXXLAVPFKAQAQ (SEQ ID NO: 49 of WO2017100671 wherein X may be any amino acid; herein SEQ ID NO: 1326), SAQXXXVPFKAQAQ (SEQ ID NO: 50 of WO2017100671 wherein X may be any amino acid; herein SEQ ID NO: 1327), SAQTLXXXFKAQAQ (SEQ ID NO: 51 of WO2017100671 wherein X may be any amino acid; herein SEQ ID NO: 1328), SAQTLAVXXXAQAQ (SEQ ID NO: 52 of WO2017100671 wherein X may be any amino acid; herein SEQ ID NO: 1329), SAQTLAVPFXXXAQ (SEQ ID NO: 53 of WO2017100671 wherein X may be any amino acid; herein SEQ ID NO: 1330), TNHQSAQ (SEQ ID NO: 65 of WO2017100671; herein SEQ ID NO: 1331), AQAQTGW (SEQ ID NO: 66 of WO2017100671; herein SEQ ID NO: 1332), DGTLATPFK (SEQ ID NO: 67 of WO2017100671; herein SEQ ID NO: 1333), DGTLATPFKXX (SEQ ID NO: 68 of WO2017100671 wherein X may be any amino acid; herein SEQ ID NO: 1334), LAVPFKAQ (SEQ ID NO: 80 of WO2017100671; herein SEQ ID NO: 1335), VPFKAQ (SEQ ID NO: 81 of WO2017100671; herein SEQ ID NO: 1336), FKAQ (SEQ ID NO: 82 of WO2017100671; herein SEQ ID NO: 1337), AQTLAV (SEQ ID NO: 83 of WO2017100671; herein SEQ ID NO: 1338), AQTLAVPF (SEQ ID NO: 84 of WO2017100671; herein SEQ ID NO: 1339), QAVR (SEQ ID NO: 85 of WO2017100671; herein SEQ ID NO: 1340), AVRT (SEQ ID NO: 86 of WO2017100671; herein SEQ ID NO: 1341), VRTS (SEQ ID NO: 87 of WO2017100671; herein SEQ ID NO: 1342), RTSL (SEQ ID NO: 88 of WO2017100671; herein SEQ ID NO: 1343), QAVRT (SEQ ID NO: 89 of WO2017100671; herein SEQ ID NO: 1344), AVRTS (SEQ ID NO: 90 of WO2017100671; herein SEQ ID NO: 1345), VRTSL (SEQ ID NO: 91 of WO2017100671; herein SEQ ID NO: 1346), QAVRTS (SEQ ID NO: 92 of WO2017100671; herein SEQ ID NO: 1347), or AVRTSL (SEQ ID NO: 93 of WO2017100671; herein SEQ ID NO: 1348).

[0230] Non-limiting examples of nucleotide sequences that may encode the amino acid inserts include the following, GATGGGACTTGGCGGTGCCTTTTAAGGCACAG (SEQ ID NO: 54 of WO2017100671; herein SEQ ID NO: 1349), GATGGGACGTTGGCGGTGCCTTTTAAGGCACAG (SEQ ID NO: 55 of WO2017100671; herein SEQ ID NO: 1350), CAGGCGGTTAGGACGTCTTTG (SEQ ID NO: 56 of WO2017100671; herein SEQ ID NO: 1351), CAGGTCTTCACGGACTCAGACTATCAG (SEQ ID NO: 57 and 78 of WO2017100671; herein SEQ ID NO: 1352), CAAGTAAAACCTCTACAAATGTGGTAAAATCG (SEQ ID NO: 58 of WO2017100671; herein SEQ ID NO: 1353), ACTCATCGACCAATACTTGTACTATCTCTCTAGAAC (SEQ ID NO: 59 of WO2017100671; herein SEQ ID NO: 1354), GGAAGTATTCCTTGGTTTTGAACCCA (SEQ ID NO: 60 of WO2017100671; herein SEQ ID NO: 1355), GGTCGCGGTTCTTGTTTGTGGAT (SEQ ID NO: 61 of WO2017100671; herein SEQ ID NO: 1356), CGACCTTGAAGCGCATGAACTCCT (SEQ ID NO: 62 of WO2017100671; herein SEQ ID NO: 1357), GTATTCCTTGGTTTTGAACCCAACCGGTCTGCGCCTGTGCMNNMNNMNNMNNMNN MNNMNNTTGGGCACTCTGGTGGTTTGTC (SEQ ID NO: 63 of WO2017100671 wherein N may be A, C, T, or G; herein SEQ ID NO: 1358), GTATTCCTTGGTTTTGAACCCAACCGGTCTGCGCMNNMNNMNNAAAAGGCACCGCC AAAGTTTG (SEQ ID NO: 69 of WO2017100671 wherein N may be A, C, T, or G; herein SEQ ID NO: 1359), GTATTCCTGGTTTGAACCCAACCGGTCTGCGCCTGTGCMNNMNNMNNCACCGCC AAAGTTTGGGCACT (SEQ ID NO: 70 of WO2017100671 wherein N may be A, C, T, or G; herein SEQ ID NO: 1360), GTATTCCTTGGITGAACCCAACCGGTCTGCGCCTGTGCCTTAAAMNNMNNMNNC AAAGTTTGGGCACTCTGGTGG (SEQ ID NO: 71 of WO2017100671 wherein N may be A, C, T, or G; herein SEQ ID NO: 1361), GTATTCCTTGGTTTTGAACCCAACCGGTCTGCGCCTGTGCCTTAAAAGGCACMNNMN NMNNTTGGGCACTCTGGTGGTfTGTG (SEQ ID NO: 72 of WO2017100671 wherein N may be A, C, T, or G; herein SEQ ID NO: 1362), ACTTTGGCGGTGCCTTTTAAG (SEQ ID NO: 74 of WO2017100671; herein SEQ ID NO: 1279), AGTGTGAGTAAGCCTTTMTG (SEQ ID NO: 75 of WO2017100671; herein SEQ ID NO: 1280), TTTACGTTGACGACGCCTAAG (SEQ ID NO: 76 of WO2017100671; herein SEQ ID NO: 1281), TATACTTTGTCGCAGGGTTGG (SEQ ID NO: 77 of WO2017100671; herein SEQ ID NO: 1287), or CTTGCGAAGGAGCGGCTTTCG (SEQ ID NO: 79 of WO2017100671; herein SEQ ID NO: 1363).

[0231] In some embodiments, the AAV serotype may be, or may have a sequence as described in U.S. Pat. No. 9,624,274, the contents of which are herein incorporated by reference in their entirety, such as, but not limited to, AAV1 (SEQ ID NO: 181 of U.S. Pat. No. 9,624,274), AAV6 (SEQ ID NO: 182 of U.S. Pat. No. 9,624,274), AAV2 (SEQ ID NO: 183 of U.S. Pat. No. 9,624,274), AAV3b (SEQ ID NO: 184 of U.S. Pat. No. 9,624,274), AAV7 (SEQ ID NO: 185 of U.S. Pat. No. 9,624,274), AAV8 (SEQ ID NO: 186 of U.S. Pat. No. 9,624,274), AAV10 (SEQ ID NO: 187 of U.S. Pat. No. 9,624,274), AAV4 (SEQ ID NO: 188 of U.S. Pat. No. 9,624,274), AAV 11 (SEQ ID NO: 189 of U.S. Pat. No. 9,624,274), bAAV (SEQ ID NO: 190 of U.S. Pat. No. 9,624,274), AAV5 (SEQ ID NO: 191 of U.S. Pat. No. 9,624,274), GPV (SEQ ID NO: 192 of U.S. Pat. No. 9,624,274; herein SEQ ID NO: 879), B19 (SEQ ID NO: 193 of U.S. Pat. No. 9,624,274; herein SEQ ID NO: 880), MVM (SEQ ID NO: 194 of U.S. Pat. No. 9,624,274; herein SEQ ID NO: 881), FPV (SEQ ID NO: 195 of U.S. Pat. No. 9,624,274; herein SEQ ID NO: 882), CPV (SEQ ID NO: 196 of U.S. Pat. No. 9,624,274; herein SEQ ID NO: 883) or variants thereof. Further, any of the structural protein inserts described in U.S. Pat. No. 9,624,274, may be inserted into, but not limited to, 1-453 and 1-587 of any parent AAV serotype, such as, but not limited to, AAV2 (SEQ ID NO: 183 of U.S. Pat. No. 9,624,274). The amino acid insert may be, but is not limited to, any of the following amino acid sequences, VNLTWSRASG (SEQ ID NO: 50 of U.S. Pat. No. 9,624,274; herein SEQ ID NO: 1364), EFCINHRGYWVCGD (SEQ ID NO:55 of U.S. Pat. No. 9,624,274; herein SEQ ID NO: 1365), EDGQVMDVDLS (SEQ ID NO: 85 of U.S. Pat. No. 9,624,274; herein SEQ ID NO: 1366), EKQRNGTLT (SEQ ID NO: 86 of US %24274; herein SEQ ID NO: 1367), TYQCRVTHPHLPRALMR (SEQ ID NO: 87 of U.S. Pat. No. 9,624,274; herein SEQ ID NO: 1368), RHSTTQPRKTKGSG (SEQ ID NO: 88 of U.S. Pat. No. 9,624,274; herein SEQ ID NO: 1369), DSNPRGVSAYLSR (SEQ ID NO: 89 of U.S. Pat. No. 9,624,274; herein SEQ ID NO: 1370), TITCLWDLAPSK (SEQ ID NO: 90 of U.S. Pat. No. 9,624,274; herein SEQ ID NO: 1371), KTKGSGFFVF (SEQ ID NO: 91 of U.S. Pat. No. 9,624,274; herein SEQ ID NO: 1372), THPHLPRALMRS (SEQ ID NO: 92 of U.S. Pat. No. 9,624,274; herein SEQ ID NO: 1373), GETYQCRVTHPHLPRALMRSTFK (SEQ ID NO: 93 of U.S. Pat. No. 9,624,274; herein SEQ ID NO: 1374), LPRALMRS (SEQ ID NO: 94 of U.S. Pat. No. 9,624,274; herein SEQ ID NO: 1375), INHRGYWV (SEQ ID NO: 95 of U.S. Pat. No. 9,624,274; herein SEQ ID NO: 1376), CDAGSVRTNAPD (SEQ ID NO: 60 of U.S. Pat. No. 9,624,274; herein SEQ ID NO: 1377), AKAVSNLTESRSESLQS (SEQ ID NO: % of U.S. Pat. No. 9,624,274; herein SEQ ID NO: 1378), SLTGDEFKKVLET (SEQ ID NO: 97 of U.S. Pat. No. 9,624,274; herein SEQ ID NO: 1379), REAVAYRFEED (SEQ ID NO: 98 of U.S. Pat. No. 9,624,274; herein SEQ ID NO: 1380), INPEIITLDG (SEQ ID NO: 99 of U.S. Pat. No. 9,624,274; herein SEQ ID NO: 1381), DISVTGAPVITATYL (SEQ ID NO: 100 of U.S. Pat. No. 9,624,274; herein SEQ ID NO: 1382), DISVTGAPVITA (SEQ ID NO: 101 of U.S. Pat. No. 9,624,274; herein SEQ ID NO: 1383), PKTVSNLTESSSESVQS (SEQ ID NO: 102 of U.S. Pat. No. 9,624,274; herein SEQ ID NO: 1384), SLMGDEFKAVLET (SEQ ID NO: 103 of U.S. Pat. No. 9,624,274; herein SEQ ID NO: 1385), QHSVAYTFEED (SEQ ID NO: 104 of U.S. Pat. No. 9,624,274; herein SEQ ID NO: 1386), INPEIITRDG (SEQ ID NO: 105 of U.S. Pat. No. 9,624,274; herein SEQ ID NO: 1387), DISLTGDPVITASYL (SEQ ID NO: 106 of U.S. Pat. No. 9,624,274; herein SEQ ID NO: 1388), DISLTGDPVITA (SEQ ID NO: 107 of U.S. Pat. No. 9,624,274; herein SEQ ID NO: 1389), DQSIDFEIDSA (SEQ ID NO: 108 of U.S. Pat. No. 9,624,274; herein SEQ ID NO: 1390), KNVSEDLPLPTFSPTLLGDS (SEQ ID NO: 109 of U.S. Pat. No. 9,624,274; herein SEQ ID NO: 1391), KNVSEDLPLPT (SEQ ID NO: 110 of U.S. Pat. No. 9,624,274; herein SEQ ID NO: 1392), CDSGRVRTDAPD (SEQ ID NO: 111 of U.S. Pat. No. 9,624,274; herein SEQ ID NO: 1393), FPEHLLVDFLQSLS (SEQ ID NO: 112 of U.S. Pat. No. 9,624,274; herein SEQ ID NO: 1394), DAEFRHDSG (SEQ ID NO: 65 of U.S. Pat. No. 9,624,274; herein SEQ ID NO: 1395), HYAAAQWDFGNTMCQL (SEQ ID NO: 113 of U.S. Pat. No. 9,624,274; herein SEQ ID NO: 1396), YAAQWDFGNTMCQ (SEQ ID NO: 114 of U.S. Pat. No. 9,624,274; herein SEQ ID NO: 1397), RSQKEGLHYT (SEQ ID NO: 115 of U.S. Pat. No. 9,624,274; herein SEQ ID NO: 1398), SSRTPSDKPVAHWANPQAE (SEQ ID NO: 116 of U.S. Pat. No. 9,624,274; herein SEQ ID NO: 1399), SRTPSDKPVAHWANP (SEQ ID NO: 117 of U.S. Pat. No. 9,624,274; herein SEQ ID NO: 1400), SSRTPSDKP (SEQ ID NO: 118 of U.S. Pat. No. 9,624,274; herein SEQ ID NO: 1401), NADGNVDYHMNSVP (SEQ ID NO: 119 of U.S. Pat. No. 9,624,274; herein SEQ ID NO: 1402), DGNVDYHMNSV (SEQ ID NO: 120 of U.S. Pat. No. 9,624,274; herein SEQ ID NO: 1403), RSFKEFLQSSLRALRQ (SEQ ID NO: 121 of US %24274; herein SEQ ID NO: 1404); FKEFLQSSLRA (SEQ ID NO: 122 of U.S. Pat. No. 9,624,274; herein SEQ ID NO: 1405), or QMWAPQWGPD (SEQ ID NO: 123 of U.S. Pat. No. 9,624,274; herein SEQ ID NO: 1406).

[0232] In some embodiments, the AAV serotype may be, or may have a sequence as described in U.S. Pat. No. 9,475,845, the contents of which are herein incorporated by reference in their entirety, such as, but not limited to, AAV capsid proteins comprising modification of one or more amino acids at amino acid positions 585 to 590 of the native AAV2 capsid protein. Further the modification may result in, but not be limited to, the amino acid sequence RGNRQA (SEQ ID NO: 3 of U.S. Pat. No. 9,475,845; herein SEQ ID NO: 1407), SSSTDP (SEQ ID NO: 4 of U.S. Pat. No. 9,475,845; herein SEQ ID NO: 1408), SSNTAP (SEQ ID NO: 5 of U.S. Pat. No. 9,475,845; herein SEQ ID NO: 1409), SNSNLP (SEQ ID NO: 6 of U.S. Pat. No. 9,475,845; herein SEQ ID NO: 1410), SSTTAP (SEQ ID NO: 7 of U.S. Pat. No. 9,475,845; herein SEQ ID NO: 1411), AANTAA (SEQ ID NO: 8 of U.S. Pat. No. 9,475,845; herein SEQ ID NO: 1412), QQNTAP (SEQ ID NO: 9 of U.S. Pat. No. 9,475,845; herein SEQ ID NO: 1413), SAQAQA (SEQ ID NO: 10 of U.S. Pat. No. 9,475,845; herein SEQ ID NO: 1414), QANTGP (SEQ ID NO: 11 of U.S. Pat. No. 9,475,845; herein SEQ ID NO: 1415), NATTAP (SEQ ID NO: 12 of U.S. Pat. No. 9,475,845; herein SEQ ID NO: 1416), SSTAGP (SEQ ID NO: 13 and 20 of U.S. Pat. No. 9,475,845; herein SEQ ID NO: 1417), QQNTAA (SEQ ID NO: 14 of U.S. Pat. No. 9,475,845; herein SEQ ID NO: 1418), PSTAGP (SEQ ID NO: 15 of U.S. Pat. No. 9,475,845; herein SEQ ID NO: 1419), NQNTAP (SEQ ID NO: 16 of U.S. Pat. No. 9,475,845; herein SEQ ID NO: 1420), QAANAP (SEQ ID NO: 17 of U.S. Pat. No. 9,475,845; herein SEQ ID NO: 1421), SIVGLP (SEQ ID NO: 18 of U.S. Pat. No. 9,475,845; herein SEQ ID NO: 1422), AASTAA (SEQ ID NO: 19, and 27 of U.S. Pat. No. 9,475,845; herein SEQ ID NO: 1423), SQNTTA (SEQ ID NO: 21 of U.S. Pat. No. 9,475,845; herein SEQ ID NO: 1424), QQDTAP (SEQ ID NO: 22 of U.S. Pat. No. 9,475,845; herein SEQ ID NO: 1425), QTNTGP (SEQ ID NO: 23 of U.S. Pat. No. 9,475,845; herein SEQ ID NO: 1426), QTNGAP (SEQ ID NO: 24 of U.S. Pat. No. 9,475,845; herein SEQ ID NO: 1427), QQNAAP (SEQ ID NO: 25 of U.S. Pat. No. 9,475,845; herein SEQ ID NO: 1428), or AANTQA (SEQ ID NO: 26 of U.S. Pat. No. 9,475,845; herein SEQ ID NO: 1429). In some embodiments, the amino acid modification is a substitution at amino acid positions 262 through 265 in the native AAV2 capsid protein or the corresponding position in the capsid protein of another AAV with a targeting sequence. The targeting sequence may be, but is not limited to, any of the amino acid sequences, NGRAHA (SEQ ID NO: 38 of U.S. Pat. No. 9,475,845; herein SEQ ID NO: 1430), QPEHSST (SEQ ID NO: 39 and 50 of U.S. Pat. No. 9,475,845; herein SEQ ID NO: 1431), VNTANST (SEQ ID NO: 40 of U.S. Pat. No. 9,475,845; herein SEQ ID NO: 1432), HGPMQKS (SEQ ID NO: 41 of U.S. Pat. No. 9,475,845; herein SEQ ID NO: 1433), PHKPPLA (SEQ ID NO: 42 of U.S. Pat. No. 9,475,845; herein SEQ ID NO: 1434), IKNNEMW (SEQ ID NO: 43 of U.S. Pat. No. 9,475,845; herein SEQ ID NO: 1435), RNLDTPM (SEQ ID NO: 44 of U.S. Pat. No. 9,475,845; herein SEQ ID NO: 1436), VDSHRQS (SEQ ID NO: 45 of U.S. Pat. No. 9,475,845; herein SEQ ID NO: 1437), YDSKTKT (SEQ ID NO: 46 of U.S. Pat. No. 9,475,845; herein SEQ ID NO: 1438), SQLPHQK (SEQ ID NO: 47 of U.S. Pat. No. 9,475,845; herein SEQ ID NO: 1439), STMQQNT (SEQ ID NO: 48 of U.S. Pat. No. 9,475,845; herein SEQ ID NO: 1440), TERYMTQ (SEQ ID NO: 49 of U.S. Pat. No. 9,475,845; herein SEQ ID NO: 1441), DASLSTS (SEQ ID NO: 51 of U.S. Pat. No. 9,475,845; herein SEQ ID NO: 1442), DLPNKKT (SEQ ID NO: 52 of U.S. Pat. No. 9,475,845; herein SEQ ID NO: 1443), DLTAARL (SEQ ID NO: 53 of U.S. Pat. No. 9,475,845; herein SEQ ID NO: 1444), EPHQFNY (SEQ ID NO: 54 of U.S. Pat. No. 9,475,845; herein SEQ ID NO: 1445), EPQSNHT (SEQ ID NO: 55 of U.S. Pat. No. 9,475,845; herein SEQ ID NO: 1446), MSSWPSQ (SEQ ID NO: 56 of U.S. Pat. No. 9,475,845; herein SEQ ID NO: 1447), NPKHNAT (SEQ ID NO: 57 of U.S. Pat. No. 9,475,845; herein SEQ ID NO: 1448), PDGMRTT (SEQ ID NO: 58 of U.S. Pat. No. 9,475,845; herein SEQ ID NO: 1449), PNNNKTT (SEQ ID NO: 59 of U.S. Pat. No. 9,475,845; herein SEQ ID NO: 1450), QSTTHDS (SEQ ID NO: 60 of U.S. Pat. No. 9,475,845; herein SEQ ID NO: 1451), TGSKQKQ (SEQ ID NO: 61 of U.S. Pat. No. 9,475,845; herein SEQ ID NO: 1452), SLKHQAL (SEQ ID NO: 62 of U.S. Pat. No. 9,475,845; herein SEQ ID NO: 1453), SPIDGEQ (SEQ ID NO: 63 of U.S. Pat. No. 9,475,845; herein SEQ ID NO: 1454), WIFPWIQL (SEQ ID NO: 64 and 112 of U.S. Pat. No. 9,475,845; herein SEQ ID NO: 1455), CDCRGDCFC (SEQ ID NO: 65 of U.S. Pat. No. 9,475,845; herein SEQ ID NO: 1456), CNGRC (SEQ ID NO: 66 of U.S. Pat. No. 9,475,845; herein SEQ ID NO: 1457), CPRECES (SEQ ID NO: 67 of U.S. Pat. No. 9,475,845; herein SEQ ID NO: 1458), CTIHWGFTLC (SEQ ID NO: 68 and 123 of U.S. Pat. No. 9,475,845; herein SEQ ID NO: 1459), CGRRAGGSC (SEQ ID NO: 69 of U.S. Pat. No. 9,475,845; herein SEQ ID NO: 1460), CKGGRAKDC (SEQ ID NO: 70 of U.S. Pat. No. 9,475,845; herein SEQ ID NO: 1461), CVPELGHEC (SEQ ID NO: 71 and 115 of U.S. Pat. No. 9,475,845; herein SEQ ID NO: 1462), CRRETAWAK (SEQ ID NO: 72 of U.S. Pat. No. 9,475,845; herein SEQ ID NO: 1463), VSWFSHRYSPFAVS (SEQ ID NO: 73 of U.S. Pat. No. 9,475,845; herein SEQ ID NO: 1464), GYRDGYAGPILYN (SEQ ID NO: 74 of U.S. Pat. No. 9,475,845; herein SEQ ID NO: 1465), XXXYXXX (SEQ ID NO: 75 of U.S. Pat. No. 9,475,845; herein SEQ ID NO: 1466), YXNW (SEQ ID NO: 76 of U.S. Pat. No. 9,475,845; herein SEQ ID NO: 1467), RPLPPLP (SEQ ID NO: 77 of U.S. Pat. No. 9,475,845; herein SEQ ID NO: 1468), APPLPPR (SEQ ID NO: 78 of U.S. Pat. No. 9,475,845; herein SEQ ID NO: 1469), DVFYPYPYASGS (SEQ ID NO: 79 of U.S. Pat. No. 9,475,845; herein SEQ ID NO: 1470), MYWYPY (SEQ ID NO: 80 of U.S. Pat. No. 9,475,845; herein SEQ ID NO: 1471), DITWDQLWDLMK (SEQ ID NO: 81 of U.S. Pat. No. 9,475,845; herein SEQ ID NO: 1472), CWDDXWLC (SEQ ID NO: 82 of U.S. Pat. No. 9,475,845; herein SEQ ID NO: 1473), EWCEYLGGYLRCYA (SEQ ID NO: 83 of U.S. Pat. No. 9,475,845; herein SEQ ID NO: 1474), YXCXXGPXTWXCXP (SEQ ID NO: 84 of U.S. Pat. No. 9,475,845; herein SEQ ID NO: 1475), IEGPTLRQWLAARA (SEQ ID NO: 85 of U.S. Pat. No. 9,475,845; herein SEQ ID NO: 1476), LWXXX (SEQ ID NO: 86 of U.S. Pat. No. 9,475,845; herein SEQ ID NO: 1477), XFXXYLW (SEQ ID NO: 87 of U.S. Pat. No. 9,475,845; herein SEQ ID NO: 1478), SSIISHFRWGLCD (SEQ ID NO: 88 of U.S. Pat. No. 9,475,845; herein SEQ ID NO: 1479), MSRPACPPNDKYE (SEQ ID NO: 89 of U.S. Pat. No. 9,475,845; herein SEQ ID NO: 1480), CLRSGRGC (SEQ ID NO: 90 of U.S. Pat. No. 9,475,845; herein SEQ ID NO: 1481), CHWMFSPWC (SEQ ID NO: 91 of U.S. Pat. No. 9,475,845; herein SEQ ID NO: 1482), WXXF (SEQ ID NO: 92 of U.S. Pat. No. 9,475,845; herein SEQ ID NO: 1483), CSSRLDAC (SEQ ID NO: 93 of U.S. Pat. No. 9,475,845; herein SEQ ID NO: 1484), CLPVASC (SEQ ID NO: 94 of U.S. Pat. No. 9,475,845; herein SEQ ID NO: 1485), CGFECVRQCPERC (SEQ ID NO: 95 of U.S. Pat. No. 9,475,845; herein SEQ ID NO: 1486), CVALCREACGEGC (SEQ ID NO: 96 of U.S. Pat. No. 9,475,845; herein SEQ ID NO: 1487), SWCEPGWCR (SEQ ID NO: 97 of U.S. Pat. No. 9,475,845; herein SEQ ID NO: 1488), YSGKWGW (SEQ ID NO: 98 of U.S. Pat. No. 9,475,845; herein SEQ ID NO: 1489), GLSGGRS (SEQ ID NO: 99 of U.S. Pat. No. 9,475,845; herein SEQ ID NO: 1490), LMLPRAD (SEQ ID NO: 100 of U.S. Pat. No. 9,475,845; herein SEQ ID NO: 1491), CSCFRDVCC (SEQ ID NO: 101 of U.S. Pat. No. 9,475,845; herein SEQ ID NO: 1492), CRDVVSVIC (SEQ ID NO: 102 of U.S. Pat. No. 9,475,845; herein SEQ ID NO: 1493), MARSGL (SEQ ID NO: 103 of U.S. Pat. No. 9,475,845; herein SEQ ID NO: 1494), MARAKE (SEQ ID NO: 104 of U.S. Pat. No. 9,475,845; herein SEQ ID NO: 1495), MSRTMS (SEQ ID NO: 105 of U.S. Pat. No. 9,475,845; herein SEQ ID NO: 1496, KCCYSL (SEQ ID NO: 106 of U.S. Pat. No. 9,475,845; herein SEQ ID NO: 1497), MYWGDSHWLQYWYE (SEQ ID NO: 107 of U.S. Pat. No. 9,475,845; herein SEQ ID NO: 1498), MQLPLAT (SEQ ID NO: 108 of U.S. Pat. No. 9,475,845; herein SEQ ID NO: 1499), EWLS (SEQ ID NO: 109 of U.S. Pat. No. 9,475,845; herein SEQ ID NO: 1500), SNEW (SEQ ID NO: 110 of U.S. Pat. No. 9,475,845; herein SEQ ID NO: 1501), TNYL (SEQ ID NO: 111 of U.S. Pat. No. 9,475,845; herein SEQ ID NO: 1502), WDLAWMFRLPVG (SEQ ID NO: 113 of U.S. Pat. No. 9,475,845; herein SEQ ID NO: 1503), CTVALPGGYVRVC (SEQ ID NO: 114 of U.S. Pat. No. 9,475,845; herein SEQ ID NO: 1504), CVAYCIEHHCWTC (SEQ ID NO: 116 of U.S. Pat. No. 9,475,845; herein SEQ ID NO: 1505). CVFAHNYDYLVC (SEQ ID NO: 117 of U.S. Pat. No. 9,475,845; herein SEQ ID NO: 1506), CVFTSNYAFC (SEQ ID NO: 118 of U.S. Pat. No. 9,475,845; herein SEQ ID NO: 1507), VHSPNKK (SEQ ID NO: 119 of U.S. Pat. No. 9,475,845; herein SEQ ID NO: 1508), CRGDGWC (SEQ ID NO: 120 of U.S. Pat. No. 9,475,845; herein SEQ ID NO: 1509), XRGCDX (SEQ ID NO: 121 of U.S. Pat. No. 9,475,845; herein SEQ ID NO: 1510), PXXX (SEQ ID NO: 122 of U.S. Pat. No. 9,475,845; herein SEQ ID NO: 1511), SGKGPRQITAL (SEQ ID NO: 124 of U.S. Pat. No. 9,475,845; herein SEQ ID NO: 1512), AAAAAAAAAXXXXX (SEQ ID NO: 125 of U.S. Pat. No. 9,475,845; herein SEQ ID NO: 1513), VYMSPF (SEQ ID NO: 126 of U.S. Pat. No. 9,475,845; herein SEQ ID NO: 1514), ATWLPPR (SEQ ID NO: 127 of U.S. Pat. No. 9,475,845; herein SEQ ID NO: 1515), HTMYYHHYQHHL (SEQ ID NO: 128 of U.S. Pat. No. 9,475,845; herein SEQ ID NO: 1516), SEVGCRAGPLQWLCEKYFG (SEQ ID NO: 129 of U.S. Pat. No. 9,475,845; herein SEQ ID NO: 1517), CGLLPVGRPDRNVWRWLC (SEQ ID NO: 130 of U.S. Pat. No. 9,475,845; herein SEQ ID NO: 1518), CKGQCDRFKGLPWEC (SEQ ID NO: 131 of U.S. Pat. No. 9,475,845; herein SEQ ID NO: 1519), SGRSA (SEQ ID NO: 132 of U.S. Pat. No. 9,475,845; herein SEQ ID NO: 1520), WGFP (SEQ ID NO: 133 of U.S. Pat. No. 9,475,845; herein SEQ ID NO: 1521), AEPMPHSLNFSQYLWYT (SEQ ID NO: 134 of U.S. Pat. No. 9,475,845; herein SEQ ID NO: 1522), WAYXSP (SEQ ID NO: 135 of U.S. Pat. No. 9,475,845; herein SEQ ID NO: 1523), IELLQAR (SEQ ID NO: 136 of U.S. Pat. No. 9,475,845; herein SEQ ID NO: 1524), AYTKCSRQWRTCMTTH (SEQ ID NO: 137 of U.S. Pat. No. 9,475,845; herein SEQ ID NO: 1525), PQNSKIPGPTFLDPH (SEQ ID NO: 138 of U.S. Pat. No. 9,475,845; herein SEQ ID NO: 1526), SMEPALPDWWWKMFK (SEQ ID NO: 139 of U.S. Pat. No. 9,475,845; herein SEQ ID NO: 1527), ANTPCGPYTHDCPVKR (SEQ ID NO: 140 of U.S. Pat. No. 9,475,845; herein SEQ ID NO: 1528), TACHQHVRMVRP (SEQ ID NO: 141 of U.S. Pat. No. 9,475,845; herein SEQ ID NO: 1529), VPWMEPAYQRFL (SEQ ID NO: 142 of U.S. Pat. No. 9,475,845; herein SEQ ID NO: 1530), DPRATPGS (SEQ ID NO: 143 of U.S. Pat. No. 9,475,845; herein SEQ ID NO: 1531), FRPNRAQDYNTN (SEQ ID NO: 144 of U.S. Pat. No. 9,475,845; herein SEQ ID NO: 1532), CTKNSYLMC (SEQ ID NO: 145 of U.S. Pat. No. 9,475,845; herein SEQ ID NO: 1533), CXXTXXXGXGC (SEQ ID NO: 146 of U.S. Pat. No. 9,475,845; herein SEQ ID NO: 1534), CPIEDRPMC (SEQ ID NO: 147 of U.S. Pat. No. 9,475,845; herein SEQ ID NO: 1535), HEWSYLAPYPWF (SEQ ID NO: 148 of U.S. Pat. No. 9,475,845; herein SEQ ID NO: 1536), MCPKHPLGC (SEQ ID NO: 149 of U.S. Pat. No. 9,475,845; herein SEQ ID NO: 1537), RMWPSSTVNLSAGRR (SEQ ID NO: 150 of U.S. Pat. No. 9,475,845; herein SEQ ID NO: 1538), SAKTAVSQRVWLPSHRGGEP (SEQ ID NO: 151 of U.S. Pat. No. 9,475,845; herein SEQ ID NO: 1539), KSREHVNNSACPSKRITAAL (SEQ ID NO: 152 of U.S. Pat. No. 9,475,845; herein SEQ ID NO: 1540), EGFR (SEQ ID NO: 153 of U.S. Pat. No. 9,475,845; herein SEQ ID NO: 1541), AGLGVR (SEQ ID NO: 154 of U.S. Pat. No. 9,475,845; herein SEQ ID NO: 1542), GTRQGHTMRLGVSDG (SEQ ID NO: 155 of U.S. Pat. No. 9,475,845; herein SEQ ID NO: 1543), IAGLATPGWSHWLAL (SEQ ID NO: 156 of U.S. Pat. No. 9,475,845; herein SEQ ID NO: 1544), SMSIARL (SEQ ID NO: 157 of U.S. Pat. No. 9,475,845; herein SEQ ID NO: 1545), HTFEPGV (SEQ ID NO: 158 of U.S. Pat. No. 9,475,845; herein SEQ ID NO: 1546), NTSLKRISNKRIRRK (SEQ ID NO: 159 of U.S. Pat. No. 9,475,845; herein SEQ ID NO: 1547), LRIKRKRRKRKKTRK (SEQ ID NO: 160 of U.S. Pat. No. 9,475,845; herein SEQ ID NO: 1548), GGG, GFS, LWS, EGG, LLV, LSP, LBS, AGG, GRR, GGH and GTV.

[0233] In some embodiments, the AAV serotype may be, or may have a sequence as described in United States Publication No. US 20160369298, the contents of which are herein incorporated by reference in their entirety, such as, but not limited to, site-specific mutated capsid protein of AAV2 (SEQ ID NO: 97 of US 20160369298; herein SEQ ID NO: 1549) or variants thereof, wherein the specific site is at least one site selected from sites R447, G453, S578, N587, N587+1. S662 of VP1 or fragment thereof.

[0234] Further, any of the mutated sequences described in US 20160369298, may be or may have, but not limited to, any of the following sequences SDSGASN (SEQ ID NO: 1 and SEQ ID NO: 231 of US20160369298; herein SEQ ID NO: 1550), SPSGASN (SEQ ID NO: 2 of US20160369298; herein SEQ ID NO: 1551), SHSGASN (SEQ ID NO: 3 of US20160369298; herein SEQ ID NO: 1552), SRSGASN (SEQ ID NO: 4 of US20160369298; herein SEQ ID NO: 1553), SKSGASN (SEQ ID NO: 5 of US20160369298; herein SEQ ID NO: 1554), SNSGASN (SEQ ID NO: 6 of US20160369298; herein SEQ ID NO: 1555), SGSGASN (SEQ ID NO: 7 of US20160369298; herein SEQ ID NO: 1556), SASGASN (SEQ ID NO: 8, 175, and 221 of US20160369298; herein SEQ ID NO: 1557), SESGTSN (SEQ ID NO: 9 of US20160369298; herein SEQ ID NO: 1558), STTGGSN (SEQ ID NO: 10 of US20160369298; herein SEQ ID NO: 1559), SSAGSTN (SEQ ID NO: 11 of US20160369298; herein SEQ ID NO: 1560), NNDSQA (SEQ ID NO: 12 of US20160369298; herein SEQ ID NO: 1561), NNRNQA (SEQ ID NO: 13 of US20160369298; herein SEQ ID NO: 1562), NNNKQA (SEQ ID NO: 14 of US20160369298; herein SEQ ID NO: 1563), NAKRQA (SEQ ID NO: 15 of US20160369298; herein SEQ ID NO: 1564), NDEHQA (SEQ ID NO: 16 of US20160369298; herein SEQ ID NO: 1565), NTSQKA (SEQ ID NO: 17 of US20160369298; herein SEQ ID NO: 1566), YYLSRTNTPSGTDTQSRLVFSQAGA (SEQ ID NO: 18 of US20160369298; herein SEQ ID NO: 1567), YYLSRTNTDSGTETQSGLDFSQAGA (SEQ ID NO: 19 of US20160369298; herein SEQ ID NO: 1568), YYLSRTNTESGTPTQSALEFSQAGA (SEQ ID NO: 20 of US20160369298; herein SEQ ID NO: 1569), YYLSRTNTHSGTHTQSPLHFSQAGA (SEQ ID NO: 21 of US20160369298; herein SEQ ID NO: 1570), YYLSRTNTSSGTITISHLIFSQAGA (SEQ ID NO: 22 of US20160369298; herein SEQ ID NO: 1571), YYLSRTNTRSGIMTKSSLMFSQAGA (SEQ ID NO: 23 of US20160369298; herein SEQ ID NO: 1572), YYLSRTNTKSGRKTLSNLSFSQAGA (SEQ ID NO: 24 of US20160369298; herein SEQ ID NO: 1573), YYLSRTNDGSGPVTPSKLRFSQRGA (SEQ ID NO: 25 of US20160369298; herein SEQ ID NO: 1574), YYLSRTNAASGHATHSDLKFSQPGA (SEQ ID NO: 26 of US20160369298; herein SEQ ID NO: 1575), YYLSRTNGQAGSLTMSELGFSQVGA (SEQ ID NO: 27 of US20160369298; herein SEQ ID NO: 1576), YYLSRTNSTGGNQTTSQLLFSQLSA (SEQ ID NO: 28 of US20160369298; herein SEQ ID NO: 1577), YFLSRTNNNTGLNTNSTLNFSQGRA (SEQ ID NO: 29 of US20160369298; herein SEQ ID NO: 1578), SKTGADNNNSEYSWTG (SEQ ID NO: 30 of US20160369298; herein SEQ ID NO: 1579), SKTDADNNNSEYSWTG (SEQ ID NO: 31 of US20160369298; herein SEQ ID NO: 1580), SKTEADNNNSEYSWTG (SEQ ID NO: 32 of US20160369298; herein SEQ ID NO: 1581), SKTPADNNNSEYSWTG (SEQ ID NO: 33 of US20160369298; herein SEQ ID NO: 1582), SKTHADNNNSEYSWTG (SEQ ID NO: 34 of US20160369298; herein SEQ ID NO: 1583), SKTQADNNNSEYSWTG (SEQ ID NO: 35 of US20160369298; herein SEQ ID NO: 1584), SKTIADNNNSEYSWTG (SEQ ID NO: 36 of US20160369298; herein SEQ ID NO: 1585), SKTMADNNNSEYSWTG (SEQ ID NO: 37 of US20160369298; herein SEQ ID NO: 1586), SKTRADNNNSEYSWTG (SEQ ID NO: 38 of US20160369298; herein SEQ ID NO: 1587), SKTNADNNNSEYSWTG (SEQ ID NO: 39 of US20160369298; herein SEQ ID NO: 1588), SKTVGRNNNSEYSWTG (SEQ ID NO: 40 of US20160369298; herein SEQ ID NO: 1589), SKTADRNNNSEYSWTG (SEQ ID NO: 41 of US20160369298; herein SEQ ID NO: 1590), SKKLSQNNNSKYSWQG (SEQ ID NO: 42 of US20160369298; herein SEQ ID NO: 1591), SKPTTGNNNSDYSWPG (SEQ ID NO: 43 of US20160369298; herein SEQ ID NO: 1592), STQKNENNNSNYSWPG (SEQ ID NO: 44 of US20160369298; herein SEQ ID NO: 1593), HKDDEGKF (SEQ ID NO: 45 of US20160369298; herein SEQ ID NO: 1594), HKDDNRKF (SEQ ID NO: 46 of US20160369298; herein SEQ ID NO: 1595), HKDDTNKF (SEQ ID NO: 47 of US20160369298; herein SEQ ID NO: 1596), HEDSDKNF (SEQ ID NO: 48 of US20160369298; herein SEQ ID NO: 1597), HRDGADSF (SEQ ID NO: 49 of US20160369298; herein SEQ ID NO: 1598), HGDNKSRF (SEQ ID NO: 50 of US20160369298; herein SEQ ID NO: 1599), KQGSEKTNVDFEEV (SEQ ID NO: 51 of US20160369298; herein SEQ ID NO: 1600), KQGSEKTNVDSEEV (SEQ ID NO: 52 of US20160369298; herein SEQ ID NO: 1601), KQGSEKTNVDVEEV (SEQ ID NO: 53 of US20160369298; herein SEQ ID NO: 1602), KQGSDKTNVDDAGV (SEQ ID NO: 54 of US20160369298; herein SEQ ID NO: 1603), KQGSSKTNVDPREV (SEQ ID NO: 55 of US20160369298; herein SEQ ID NO: 1604), KQGSRKTNVDHKQV (SEQ ID NO: 56 of US20160369298; herein SEQ ID NO: 1605), KQGSKGGNVDTNRV (SEQ ID NO: 57 of US20160369298; herein SEQ ID NO: 1606), KQGSGEANVDNGDV (SEQ ID NO: 58 of US20160369298; herein SEQ ID NO: 1607), KQDAAADNIDYDHV (SEQ ID NO: 59 of US20160369298; herein SEQ ID NO: 1608), KQSGTRSNAAASSV (SEQ ID NO: 60 of US20160369298; herein SEQ ID NO: 1609), KENTNTNDTELTNV (SEQ ID NO: 61 of US20160369298; herein SEQ ID NO: 1610), QRGNNVAATADVNT (SEQ ID NO: 62 of US20160369298; herein SEQ ID NO: 1611), QRGNNEAATADVNT (SEQ ID NO: 63 of US20160369298; herein SEQ ID NO: 1612), QRGNNPAATADVNT (SEQ ID NO: 64 of US20160369298; herein SEQ ID NO: 1613), QRGNNHAATADVNT (SEQ ID NO: 65 of US20160369298; herein SEQ ID NO: 1614), QEENNIAATPGVNT (SEQ ID NO: 66 of US20160369298; herein SEQ ID NO: 1615), QPPNNMAATHEVNT (SEQ ID NO: 67 of US20160369298; herein SEQ ID NO: 1616), QHHNNSAATTIVNT (SEQ ID NO: 68 of US20160369298; herein SEQ ID NO: 1617), QTTNNRAAFNMVET (SEQ ID NO: 69 of US20160369298; herein SEQ ID NO: 1618), QKKNNNAASKKVAT (SEQ ID NO: 70 of US20160369298; herein SEQ ID NO: 1619), QGGNNKAADDAVKT (SEQ ID NO: 71 of US20160369298; herein SEQ ID NO: 1620). QAAKGGAADDAVKT (SEQ ID NO: 72 of US20160369298; herein SEQ ID NO: 1621), QDDRAAAANESVDT (SEQ ID NO: 73 of US20160369298; herein SEQ ID NO: 1622), QQQHDDAAYQRVHT (SEQ ID NO: 74 of US20160369298; herein SEQ ID NO: 1623), QSSSSLAAVSTVQT (SEQ ID NO: 75 of US20160369298; herein SEQ ID NO: 1624), QNNQTTAAIRNVTT (SEQ ID NO: 76 of US20160369298; herein SEQ ID NO: 1625), NYNKKSDNVDFT (SEQ ID NO: 77 of US20160369298; herein SEQ ID NO: 1626), NYNKKSENVDFT (SEQ ID NO: 78 of US20160369298; herein SEQ ID NO: 1627), NYNKKSLNVDFT (SEQ ID NO: 79 of US20160369298; herein SEQ ID NO: 1628), NYNKKSPNVDFT (SEQ ID NO: 80 of US20160369298; herein SEQ ID NO: 1629), NYSKKSHCVDFT (SEQ ID NO: 81 of US20160369298; herein SEQ ID NO: 1630). NYRKTIYVDFT (SEQ ID NO: 82 of US20160369298; herein SEQ ID NO: 1631), NYKEKKDVHFT (SEQ ID NO: 83 of US20160369298; herein SEQ ID NO: 1632), NYGHRAIVQFT (SEQ ID NO: 84 of US20160369298; herein SEQ ID NO: 1633), NYANHQFVVCT (SEQ ID NO: 85 of US20160369298; herein SEQ ID NO: 1634), NYDDDPTGVLLT (SEQ ID NO: 86 of US20160369298; herein SEQ ID NO: 1635), NYDDPTGVLLT (SEQ ID NO: 87 of US20160369298; herein SEQ ID NO: 1636), NFEQQNSVEWT (SEQ ID NO: 88 of US20160369298; herein SEQ ID NO: 1637), SQSGASN (SEQ ID NO: 89 and SEQ ID NO: 241 of US20160369298; herein SEQ ID NO: 1638), NNGSQA (SEQ ID NO: 90 of US20160369298; herein SEQ ID NO: 1639), YYLSRTNTPSGTTTWSRLQFSQAGA (SEQ ID NO: 91 of US20160369298; herein SEQ ID NO: 1640), SKTSADNNNSEYSWTG (SEQ ID NO: 92 of US20160369298; herein SEQ ID NO: 1641), HKDDEEKF (SEQ ID NO: 93, 209, 214, 219, 224, 234, 239, and 244 of US20160369298; herein SEQ ID NO: 1642), KQGSEKTNVDIEEV (SEQ ID NO: 94 of US20160369298; herein SEQ ID NO: 1643), QRGNNQAATADVNT (SEQ ID NO: 95 of US20160369298; herein SEQ ID NO: 1644), NYNKKSVNVDFT (SEQ ID NO: 96 of US20160369298; herein SEQ ID NO: 1645), SQSGASNYNTPSGTTTQSRLQFSTSADNNNSEYSWVTGATKYH (SEQ ID NO: 106 of US20160369298; herein SEQ ID NO: 1646), SASGASNFNSEGGSLTQSSLGFSTDGENNNSDFSWTGATKYH (SEQ ID NO: 107 of US20160369298; herein SEQ ID NO: 1647), SQSGASNYNTPSGTTTQSRLQFSTDGENNNSDFSWTGATKYH (SEQ ID NO: 108 of US20160369298; herein SEQ ID NO: 1648), SASGASNYNTPSGTTQSRLQFSTSADNNNSEFSWPGA TTYH (SEQ ID NO: 109 of US20160369298; herein SEQ ID NO: 1649), SQSGASNFNSEGGSLTQSSLGFSTDGENNNSDFSWTGATKYH (SEQ ID NO: 110 of US20160369298; herein SEQ ID NO: 1650), SASGASNYNTPSGSLTQSSLGFSTDGENNNSDFSWTGATKYH (SEQ ID NO: 111 of US20160369298; herein SEQ ID NO: 1651), SQSGASNYNTPSGTTTQSRLQFSTSADNNNSDFSWfGATKYH (SEQ ID NO: 112 of US20160369298; herein SEQ ID NO: 1652), SGAGASNFNSEGGSLTQSSLGFSTDGENNNSDFSWTGATKYH (SEQ ID NO: 113 of US20160369298; herein SEQ ID NO: 1653), SGAGASN (SEQ ID NO: 176 of US20160369298; herein SEQ ID NO: 1654), NSEGGSLTQSSLGFS (SEQ ID NO: 177, 185, 193 and 202 of US20160369298; herein SEQ ID NO: 1655), TDGENNNSDFS (SEQ ID NO: 178 of US20160369298; herein SEQ ID NO: 1656), SEFSWPGATT (SEQ ID NO: 179 of US20160369298; herein SEQ ID NO: 1657), TSADNNNSDFSWT (SEQ ID NO: 180 of US20160369298; herein SEQ ID NO: 1658), SQSGASNY (SEQ ID NO: 181, 187, and 198 of US20160369298; herein SEQ ID NO: 1659), NTPSGTTTQSRLQFS (SEQ ID NO: 182, 188, 191, and 199 of US20160369298; herein SEQ ID NO: 1660), TSADNNNSEYSWTGATKYH (SEQ ID NO: 183 of US20160369298; herein SEQ ID NO: 1661), SASGASNF (SEQ ID NO: 184 of US20160369298; herein SEQ ID NO: 1662), TDGENNNSDFSWTGATKYH (SEQ ID NO: 186, 189, 194, 197, and 203 of US20160369298; herein SEQ ID NO: 1663), SASGASNY (SEQ ID NO: 190 and SEQ ID NO: 195 of US20160369298; herein SEQ ID NO: 1664), TSADNNNSEFSWPGATTYH (SEQ ID NO: 192 of US20160369298; herein SEQ ID NO: 1665), NTPSGSLTQSSLGFS (SEQ ID NO: 196 of US20160369298; herein SEQ ID NO: 1666), TSADNNNSDFSWTGATKYH (SEQ ID NO: 200 of US20160369298; herein SEQ ID NO: 1667), SGAGASNF (SEQ ID NO: 201 of US20160369298; herein SEQ ID NO: 1668), CTCCAGVVSVVSMRSRVCVNSGCAGCTDHCVVSRNSGTCVMSACACAA (SEQ ID NO: 204 of US20160369298; herein SEQ ID NO: 1669), CTCCAGAGAGGCAACAGACAAGCAGCTACCGCAGATGTCAACACACAA (SEQ ID NO: 205 of US20160369298; herein SEQ ID NO: 1670), SAAGASN (SEQ ID NO: 206 of US20160369298; herein SEQ ID NO: 1671), YFLSRTNTESGSTTQSTLRFSQAG (SEQ ID NO: 207 of US20160369298; herein SEQ ID NO: 1672), SKTSADNNNSDFS (SEQ ID NO: 208, 228, and 253 of US20160369298; herein SEQ ID NO: 1673), KQGSEKTDVDIDKV (SEQ ID NO: 210 of US20160369298; herein SEQ ID NO: 1674), STAGASN (SEQ ID NO: 211 of US20160369298; herein SEQ ID NO: 1675), YFLSRTNTTSGIETQSTLRFSQAG (SEQ ID NO: 212 and SEQ ID NO: 247 of US20160369298; herein SEQ ID NO: 1676), SKTDGENNNSDFS (SEQ ID NO: 213 and SEQ ID NO: 248 of US20160369298; herein SEQ ID NO: 1677). KQGAAADDVEIDGV (SEQ ID NO: 215 and SEQ ID NO: 250 of US20160369298; herein SEQ ID NO: 1678), SEAGASN (SEQ ID NO: 216 of US20160369298; herein SEQ ID NO: 1679), YYLSRTNTPSGTTTQSRLQFSQAG (SEQ ID NO: 217, 232 and 242 of US20160369298; herein SEQ ID NO: 1680), SKTSADNNNSEYS (SEQ ID NO: 218, 233, 238, and 243 of US20160369298; herein SEQ ID NO: 1681), KQGSEKTNVDIEKV (SEQ ID NO: 220, 225 and 245 of US20160369298; herein SEQ ID NO: 1682), YFLSRTNDASGSDTKSTLLFSQAG (SEQ ID NO: 222 of US20160369298; herein SEQ ID NO: 1683), STTPSENNNSEYS (SEQ ID NO: 223 of US20160369298; herein SEQ ID NO: 1684), SAAGATN (SEQ ID NO: 226 and SEQ ID NO: 251 of US20160369298; herein SEQ ID NO: 1685), YFLSRTNGEAGSATLSELRFSQAG (SEQ ID NO: 227 of US20160369298; herein SEQ ID NO: 1686), HGDDADRF (SEQ ID NO: 229 and SEQ ID NO: 254 of US20160369298; herein SEQ ID NO: 1687), KQGAEKSDVEVDRV (SEQ ID NO: 230 and SEQ ID NO: 255 of US20160369298; herein SEQ ID NO: 1688), KQDSGGDNIDIDQV (SEQ ID NO: 235 of US20160369298; herein SEQ ID NO: 1689), SDAGASN (SEQ ID NO: 236 of US20160369298; herein SEQ ID NO: 1690), YFLSRTNTEGGHDTQSTLRFSQAG (SEQ ID NO: 237 of US20160369298; herein SEQ ID NO: 1691), KEDGGGSDVAIDEV (SEQ ID NO: 240 of US20160369298; herein SEQ ID NO: 1692), SNAGASN (SEQ ID NO: 246 of US20160369298; herein SEQ ID NO: 1693), and YFLSRTNGEAGSATLSELRFSQPG (SEQ ID NO: 252 of US20160369298; herein SEQ ID NO: 1694). Non-limiting examples of nucleotide sequences that may encode the amino acid mutated sites include the following, AGCVVMDCAGGARSCASCAAC (SEQ ID NO: 97 of US20160369298; herein SEQ ID NO: 1695), AACRACRRSMRSMAGGCA (SEQ ID NO: 98 of US20160369298; herein SEQ ID NO: 1696), CACRRGGACRRCRMSRRSARSTTT (SEQ ID NO: 99 of US20160369298; herein SEQ ID NO: 1697), TATTTCTTGAGCAGAACAAACRVCVVSRSCGGAMNCVHSACGMHSTCAVVSCTTVDS TTTTCTCAGSBCRGSGCG (SEQ ID NO: 100 of US20160369298; herein SEQ ID NO: 1698), TCAAMAMMAVNSRVCSRSAACAACAACAGTRASTTCTCGTGGMMAGGA (SEQ ID NO: 101 of US20160369298; herein SEQ ID NO: 1699), AAGSAARRCRSCRVSRVARVCRATRYCGMSNHCRVMVRSGTC (SEQ ID NO: 102 of US20160369298; herein SEQ ID NO: 1700), CAGVVSVVSMRSRVCVNSGCAGCTDHCVVSRNSGTCVMSACA (SEQ ID NO: 103 of US20160369298; herein SEQ ID NO: 1701), AACTWCRVSVASMVSVHSDDTGTGSWSTKSACT (SEQ ID NO: 104 of US20160369298; herein SEQ ID NO: 1702), TTGTTGAACATCACCACGTGACGCACGTTC (SEQ ID NO: 256 of US20160369298; herein SEQ ID NO: 1703), TCCCCGTGGTTCTACTACATAATGTGGCCG (SEQ ID NO: 257 of US20160369298; herein SEQ ID NO: 1704), TTCCACACTCCGTTTGGATAATGTFGAAC (SEQ ID NO: 258 of US20160369298; herein SEQ ID NO: 1705), AGGGACATCCCCAGCTCCATGCTGTGGTCG (SEQ ID NO: 259 of US20160369298; herein SEQ ID NO: 1706), AGGGACAACCCCTCCGACTCGCCCTAATCC (SEQ ID NO: 260 of US20160369298; herein SEQ ID NO: 1707), TCCTAGTAGAAGACACCCTCTCACTGCCCG (SEQ ID NO: 261 of US20160369298; herein SEQ ID NO: 1708), AGTACCATGTACACCCACTCTCCCAGTGCC (SEQ ID NO: 262 of US20160369298; herein SEQ ID NO: 1709), ATATGGACGTTCATGCTGATCACCATACCG (SEQ ID NO: 263 of US20160369298; herein SEQ ID NO: 1710), AGCAGGAGCTCCTTGGCCTCAGCGTGCGAG (SEQ ID NO: 264 of US20160369298; herein SEQ ID NO: 1711), ACAAGCAGCTTCACTATGACAACCACTGAC (SEQ ID NO: 265 of US20160369298; herein SEQ ID NO: 1712), CAGCCTAGGAACTGGCTTCCTGGACCCTGTTACCGCCAGCAGAGAGTCTCAAMAMM AVNSRVCSRSAACAACAACAGTRASTTCTCCTGGMMAGGAGCTACCAAGTACCACCT CAATGGCAGAGACTCTCTGGTGAATCCCGGACCAGCTATGGCAAGCCACRRGGACR RCRMSRRSARSTTTTTCCTCAGAGCGGGGTTCTCATCTTGGGAAGSAARRCRSCRV SRVARVCRATRYCGMSNHCRVMVRSGTCATGATTACAGACGAAGAGGAGATCTGGA C (SEQ ID NO: 266 of US20160369298; herein SEQ ID NO: 1713), TGGGACAATGGCGGTCGTCTCTCAGAGTTKTKKT (SEQ ID NO: 267 of US20160369298; herein SEQ ID NO: 1714), AGAGGACCKKTCCTCGATGGTTCATGGTGGAGTTA (SEQ ID NO: 268 of US20160369298; herein SEQ ID NO: 1715), CCACTTAGGGCCTGGTCGATACCGTTCGGTG (SEQ ID NO: 269 of US20160369298; herein SEQ ID NO: 1716), and TCTCGCCCCAAGAGTAGAAACCCTTCSTTYYG (SEQ ID NO: 270 of US20160369298; herein SEQ ID NO: 1717).

[0235] In some embodiments, the AAV serotype may comprise an ocular cell targeting peptide as described in International Patent Publication WO2016134375, the contents of which are herein incorporated by reference in their entirety, such as, but not limited to SEQ ID NO: 9, and SEQ ID NO:10 of WO2016134375. Further, any of the ocular cell targeting peptides or amino acids described in WO2016134375, may be inserted into any parent AAV serotype, such as, but not limited to, AAV2 (SEQ ID NO:8 of WO2016134375; herein SEQ ID NO: 1718), or AAV9 (SEQ ID NO: 11 of WO2016134375; herein SEQ ID NO: 1719). In some embodiments, modifications, such as insertions are made in AAV2 proteins at P34-A35, T138-A139, A139-P140, G453-T454, N587-R588, and/or R588-Q589. In certain embodiments, insertions are made at D384, G385, 1560, T561, N562, E563, E564, E565, N704, and/or Y705 of AAV9. The ocular cell targeting peptide may be, but is not limited to, any of the following amino acid sequences, GSTPPPM (SEQ ID NO: 1 of WO2016134375; herein SEQ ID NO: 1720), or GETRAPL (SEQ ID NO: 4 of WO2016134375; herein SEQ ID NO: 1721).

[0236] In some embodiments, the AAV serotype may be modified as described in the United States Publication US 20170145405 the contents of which are herein incorporated by reference in their entirety. AAV serotypes may include, modified AAV2 (e.g., modifications at Y444F, Y500F, Y730F and/or S662V), modified AAV3 (e.g., modifications at Y705F, Y731F and/or T492V), and modified AAV6 (e.g., modifications at S663V and/or T492V).

[0237] In some embodiments, the AAV serotype may be modified as described in the International Publication WO2017083722 the contents of which are herein incorporated by reference in their entirety. AAV serotypes may include, AAV1 (Y705+731F+T492V), AAV2 (Y444+500+730F+T491V), AAV3 (Y705+731F), AAV5, AAV 5 (Y436+693+719F), AAV6 (VP3 variant Y705F/Y731F/T492V), AAV8 (Y733F), AAV9, AAV9 (VP3 variant Y731F), and AAV10 (Y733F).

[0238] In some embodiments, the AAV serotype may comprise, as described in International Patent Publication WO2017015102, the contents of which are herein incorporated by reference in their entirety, an engineered epitope comprising the amino acids SPAKFA (SEQ ID NO: 24 of WO2017015102; herein SEQ ID NO: 1722) or NKDKLN (SEQ ID NO:2 of WO2017015102; herein SEQ ID NO: 1723). The epitope may be inserted in the region of amino acids 665 to 670 based on the numbering of the VP1 capsid of AAV8 (SEQ ID NO: 3 of WO2017015102) and/or residues 664 to 668 of AAV3B (SEQ ID NO: 3).

[0239] In some embodiments, the AAV serotype may be, or may have a sequence as described in International Patent Publication WO2017058892, the contents of which are herein incorporated by reference in their entirety, such as, but not limited to, AAV variants with capsid proteins that may comprise a substitution at one or more (e.g., 2, 3, 4, 5, 6, or 7) of amino acid residues 262-268, 370-379, 451-459, 472473, 493-500, 528-534, 547-552, 588-597, 709-710, 716-722 of AAV1, in any combination, or the equivalent amino acid residues in AAV2, AAV3, AAV4, AAV5, AAV6, AAV7, AAV8, AAV9, AAV10, AAV11, AAV12, AAVrh8, AAVrh10, AAVrh32.33, bovine AAV or avian AAV. The amino acid substitution may be, but is not limited to, any of the amino acid sequences described in WO2017058892. In some embodiments, the AAV may comprise an amino acid substitution at residues 256L, 258K, 259Q, 261S, 263A, 264S, 265T, 266G, 272H, 385S, 386Q, S472R, V473D, N500E 547S, 709A, 710N, 716D, 717N, 718N, 720L, A456T, Q457T, N458Q, K459S, T492S, K493A, S586R, S587G, S588N, T589R and/or 722T of AAV1 (SEQ ID NO: 1 of WO2017058892) in any combination, 244N, 246Q, 248R, 249E, 250I, 251K, 252S, 253G, 254S, 255V, 256D, 263Y, 377E, 378N, 453L, 456R, 532Q, 533P, 535N, 536P, 537G, 538T, 539T, 540A, 541T, 542Y, 543L, 546N, 653V. 654P, 656S, 697Q, 698F, 704D, 705S, 706T, 707G, 708E, 709Y and/or 710R of AAV5 (SEQ ID NO:5 of WO2017058892) in any combination, 248R, 316V, 317Q, 318D, 319S, 443N, 530N, 531 S, 532Q 533P, 534A, 535N, 540A, 541 T, 542Y, 543L, 5450, 546N, 697Q, 704D, 706T, 708E, 709Y and/or 710R of AAV5 (SEQ ID NO: 5 of WO2017058892) in any combination, 264S, 266G, 269N, 272H, 457Q, 588S and/or 5891 of AAV6 (SEQ ID NO:6 WO2017058892) in any combination, 457T, 459N, 496G, 499N, 500N, 589Q, 590N and/or 592A of AAV8 (SEQ ID NO: 8 WO2017058892) in any combination, 451I, 452N, 453G, 454S, 455G. 456Q, 457N and/or 458Q of AAV9 (SEQ ID NO: 9 WO2017058892) in any combination.

[0240] In some embodiments, the AAV may include a sequence of amino acids at positions 155, 156 and 157 of VP1 or at positions 17, 18, 19 and 20 of VP2, as described in International Publication No. WO 2017066764, the contents of which are herein incorporated by reference in their entirety. The sequences of amino acid may be, but not limited to, N—S—S, S—X—S, S—S—Y, N—X—S, N—S—Y, S—X—Y and N—X—Y, where N, X and Y are, but not limited to, independently non-serine, or non-threonine amino acids, wherein the AAV may be, but not limited to AAV1, AAV2, AAV3, AAV4, AAV5, AAV6, AAV7, AAV8, AAV9, AAV10, AAV11 and AAV12. In some embodiments, the AAV may include a deletion of at least one amino acid at positions 156, 157 or 158 of VP1 or at positions 19, 20 or 21 of VP2, wherein the AAV may be, but not limited to AAV1, AAV2, AAV3, AAV4, AAV5, AAV6. AAV7, AAV8, AAV9, AAV10, AAV 11 and AAV12.

[0241] In some embodiments, the AAV may be a serotype generated by Cre-recombination-based AAV targeted evolution (CREATE) as described by Deverman et al., (Nature Biotechnology 34(2):204-209 (2016)), the contents of which are herein incorporated by reference in their entirety. In some embodiments, AAV serotypes generated in this manner have improved CNS transduction and/or neuronal and astrocytic tropism, as compared to other AAV serotypes. As non-limiting examples, the AAV serotype may include a peptide such as, but not limited to, PHP.B, PHP.B2, PHP.B3, PHP.A, PHP.S, G2A12, G2A15, G2A3, G2B4, and G2B5. In some embodiments, these AAV serotypes may be AAV9 (SEQ ID NO: 11 or 138) derivatives with a 7-amino acid insert between amino acids 588-589. Non-limiting examples of these 7-amino acid inserts include TLAVPFK (PHP.B: SEQ ID NO: 1262), SVSKPFL (PHP.B2; SEQ ID NO: 1270), FTLTTPK (PHP.B3; SEQ ID NO: 1271), YTLSQGW (PHP.A; SEQ ID NO: 1277), QAVRTSL (PHP.S; SEQ ID NO: 1321), LAKERLS (G2A3; SEQ ID NO: 1322), MNSTKNV (G2B4; SEQ ID NO: 1323), and/or VSGGHHS (G2B5; SEQ ID NO: 1324).

[0242] In some embodiments, the AAV serotype may be as described in Jackson et al (Frontiers in Molecular Neuroscience 9:154 (2016)), the contents of which are herein incorporated by reference in their entirety. In some embodiments, the AAV serotype is PHP.B or AAV9. In some embodiments, the AAV serotype is paired with a synapsin promoter to enhance neuronal transduction, as compared to when more ubiquitous promoters are used (i.e., CBA or CMV).

[0243] In some embodiments, the AAV serotype is a serotype comprising the AAVPHP.N (PHP.N) peptide, or a variant thereof.

[0244] In some embodiments the AAV serotype is a serotype comprising the AAVPHP.B (PHP.B) peptide, or a variant thereof.

[0245] In some embodiments, the AAV serotype is a serotype comprising the AAVPHP.A (PHP.A) peptide, or a variant thereof.

[0246] In some embodiments, the AAV serotype is a serotype comprising the PHP.S peptide, or a variant thereof.

[0247] In some embodiments, the AAV serotype is a serotype comprising the PHP.B2 peptide, or a variant thereof.

[0248] In some embodiments, the AAV serotype is a serotype comprising the PHP.B3 peptide, or a variant thereof.

[0249] In some embodiments, the AAV serotype is a serotype comprising the G2B4 peptide, or a variant thereof.

[0250] In some embodiments, the AAV serotype is a serotype comprising the G2B5 peptide, or a variant thereof.

[0251] In some embodiments the AAV serotype is VOY101, or a variant thereof.

[0252] In some embodiments, the AAV serotype is VOY201, or a variant thereof.

[0253] In some embodiments, the AAV serotype is selected for use due to its tropism for cells of the central nervous system. In some embodiments, the cells of the central nervous system are neurons. In another embodiment, the cells of the central nervous system are astrocytes.

[0254] In some embodiments, the AAV serotype is selected for use due to its tropism for cells of the muscle(s).

[0255] In some embodiments, the initiation codon for translation of the AAV VP1 capsid protein may be CTG, TTG, or GTG as described in U.S. Pat. No. 8,163,543, the contents of which are herein incorporated by reference in its entirety.

[0256] The present disclosure refers to structural capsid proteins (including VP1, VP2 and VP3) which are encoded by capsid (Cap) genes. These capsid proteins form an outer protein structural shell (i.e. capsid) of a viral vector such as AAV. VP capsid proteins synthesized from Cap polynucleotides generally include a methionine as the first amino acid in the peptide sequence (Met1), which is associated with the start codon (AUG or ATG) in the corresponding Cap nucleotide sequence. However, it is common for a first-methionine (Met1) residue or generally any first amino acid (AA1) to be cleaved off after or during polypeptide synthesis by protein processing enzymes such as Met-aminopeptidases. This “Met/AA-clipping” process often correlates with a corresponding acetylation of the second amino acid in the polypeptide sequence (e.g., alanine, valine, serine, threonine, etc.). Met-clipping commonly occurs with VP1 and VP3 capsid proteins but can also occur with VP2 capsid proteins.

[0257] Where the Met/AA-clipping is incomplete, a mixture of one or more (one, two or three) VP capsid proteins comprising the viral capsid may be produced, some of which may include a Met1/AA1 amino acid (Met+/AA+) and some of which may lack a Met1/AA1 amino acid as a result of Met/AA-clipping (Met−/AA−). For further discussion regarding Met/AA-clipping in capsid proteins, see Jin, et al. Direct Liquid Chromatography/Mass Spectrometry Analysis for Complete Characterization of Recombinant Adeno-Associated Virus Capsid Proteins. Hum Gene Ther Methods. 2017 Oct. 28(5):255-267; Hwang, et al. N-Terminal Acetylation of Cellular Proteins Creates Specific Degradation Signals. Science. 2010 Feb. 19, 327(5968): 973-977; the contents of which are each incorporated herein by reference in its entirety.

[0258] According to the present disclosure, references to capsid proteins is not limited to either clipped (Met−/AA−) or unclipped (Met+/AA+) and may, in context, refer to independent capsid proteins, viral capsids comprised of a mixture of capsid proteins, and/or polynucleotide sequences (or fragments thereof) which encode, describe, produce or result in capsid proteins of the present disclosure. A direct reference to a “capsid protein” or “capsid polypeptide” (such as VP1, VP2 or VP2) may also comprise VP capsid proteins which include a Met1/AA1 amino acid (Met+/AA+) as well as corresponding VP capsid proteins which lack the Met1/AA1 amino acid as a result of Met/AA-clipping (Met−/AA−).

[0259] Further according to the present disclosure, a reference to a specific SEQ ID NO: (whether a protein or nucleic acid) which comprises or encodes, respectively, one or more capsid proteins which include a Met1/AA1 amino acid (Met+/AA+) should be understood to teach the VP capsid proteins which lack the Met1/AA1 amino acid as upon review of the sequence, it is readily apparent any sequence which merely lacks the first listed amino acid (whether or not Met1/AA1).

[0260] As a non-limiting example, reference to a VP1 polypeptide sequence which is 736 amino acids in length and which includes a “Met1” amino acid (Met+) encoded by the AUG/ATG start codon may also be understood to teach a VP1 polypeptide sequence which is 735 amino acids in length and which does not include the “Met1” amino acid (Met−) of the 736 amino acid Met+ sequence. As a second non-limiting example, reference to a VP1 polypeptide sequence which is 736 amino acids in length and which includes an “AA1” amino acid (AA1+) encoded by any NNN initiator codon may also be understood to teach a VP1 polypeptide sequence which is 735 amino acids in length and which does not include the “AA1” amino acid (AA1−) of the 736 amino acid AA1+ sequence.

[0261] References to viral capsids formed from VP capsid proteins (such as reference to specific AAV capsid serotypes), can incorporate VP capsid proteins which include a Met1/AA1 amino acid (Met+/AA1+), corresponding VP capsid proteins which lack the Met1/AA1 amino acid as a result of Met/AA1-clipping (Met−/AA1−), and combinations thereof (Met+/AA1+ and Met−/AA1−).

[0262] As a non-limiting example, an AAV capsid serotype can include VP1 (Met+/AA1+), VP1 (Met−/AA1−), or a combination of VP1 (Met+/AA1+) and VP1 (Met−/AA1−). An AAV capsid serotype can also include VP3 (Met+/AA1+), VP3 (Met−/AA1−), or a combination of VP3 (Met+/AA1+) and VP3 (Met−/AA1−): and can also include similar optional combinations of VP2 (Met+/AA1) and VP2 (Met−/AA1−).

Vector genome Component: Inverted Terminal Repeats (ITRs)

[0263] The AAV particles and/or VAPs of the present disclosure comprise a vector genome with at least one ITR region and a payload region. In some embodiments, the vector genome has two ITRs. These two ITRs flank the payload region at the 5′ and 3′ ends. The ITRs function as origins of replication comprising recognition sites for replication. ITRs comprise sequence regions which can be complementary and symmetrically arranged. ITRs incorporated into vector genomes may be comprised of naturally occurring polynucleotide sequences or recombinantly derived polynucleotide sequences.

[0264] The ITRs may be derived from the same serotype as the capsid, selected from any of the serotypes listed in Table 1, or a derivative thereof. The ITR may be of a different serotype than the capsid. In some embodiments, the AAV particle and/or VAP has more than one ITR. In a non-limiting example, the AAV particle and/or VAP has a vector genome comprising two ITRs. In some embodiments, the ITRs are of the same serotype as one another. In another embodiment, the ITRs are of different serotypes. Non-limiting examples include zero, one or both of the ITRs having the same serotype as the capsid. In some embodiments both ITRs of the vector genome of the AAV particle and/or VAP are AAV2 ITRs.

[0265] Independently, each ITR may be about 100 to about 150 nucleotides in length. An ITR may be about 100-105 nucleotides in length, 106-110 nucleotides in length, 111-115 nucleotides in length, 116-120 nucleotides in length, 121-125 nucleotides in length, 126-130 nucleotides in length, 131-135 nucleotides in length, 136-140 nucleotides in length, 141-145 nucleotides in length or 146-150 nucleotides in length. In some embodiments, the ITRs are 140-142 nucleotides in length. Non-limiting examples of ITR length are 102, 130, 140, 141, 142, 145 nucleotides in length, and those having at least 95% identity thereto.

[0266] In some embodiments, each ITR may be 141 nucleotides in length.

[0267] In some embodiments, each ITR may be 130 nucleotides in length.

[0268] In some embodiments, the AAV particles and/or VAPs comprise two ITRs and one ITR is 141 nucleotides in length and the other ITR is 130 nucleotides in length.

### Vector Genome Component: Promoters

[0269] In some embodiments, the payload region of the vector genome comprises at least one element to enhance the transgene target specificity and expression (See e.g., Powell et al. Viral Expression Cassette Elements to Enhance Transgene Target Specificity and Expression in Gene Therapy, 2015: the contents of which are herein incorporated by reference in its entirety). Non-limiting examples of elements to enhance the transgene target specificity and expression include promoters, endogenous miRNAs, post-transcriptional regulatory elements (PREs), polyadenylation (PolyA) signal sequences and upstream enhancers (USEs), CMV enhancers and introns.

[0270] A person skilled in the art may recognize that expression of the polypeptides in a target cell may require a specific promoter, including but not limited to, a promoter that is species specific, inducible, tissue-specific, or cell cycle-specific (Parr et al., Nat. Med. 3: 1145-9 (1997); the contents of which are herein incorporated by reference in their entirety).

[0271] In some embodiments, the promoter is deemed to be efficient when it drives expression of the polypeptide(s) encoded in the payload region of the vector genome of the AAV particle and/or VAR

[0272] In some embodiments, the promoter is a promoter deemed to be efficient when it drives expression in the cell being targeted.

[0273] In some embodiments, the promoter drives expression of at least one VENOM element for a period of time in targeted tissues. Expression driven by a promoter may be for a period of 1 hour, 2, hours, 3 hours, 4 hours, 5 hours, 6 hours, 7 hours. 8 hours, 9 hours, 10 hours, 11 hours, 12 hours, 13 hours, 14 hours, 15 hours, 16 hours, 17 hours, 18 hours, 19 hours, 20 hours, 21 hours, 22 hours, 23 hours, 1 day, 2 days, 3 days, 4 days, 5 days, 6 days, 1 week, 8 days, 9 days, 10 days, 11 days, 12 days, 13 days, 2 weeks, 15 days, 16 days, 17 days, 18 days, 19 days, 20 days. 3 weeks, 22 days, 23 days, 24 days, 25 days, 26 days, 27 days, 28 days, 29 days, 30 days, 31 days, 1 month, 2 months, 3 months, 4 months, 5 months, 6 months, 7 months, 8 months, 9 months, 10 months, 11 months, 1 year, 13 months, 14 months, 15 months, 16 months, 17 months, 18 months. 19 months, 20 months, 21 months, 22 months, 23 months, 2 years, 3 years, 4 years, 5 years, 6 years, 7 years, 8 years, 9 years, 10 years or more than 10 years. Expression may be for 1-5 hours, 1-12 hours, 1-2 days, 1-5 days, 1-2 weeks, 1-3 weeks, 1-4 weeks, 1-2 months, 1-4 months, 1-6 months, 2-6 months, 3-6 months, 3-9 months, 4-8 months, 6-12 months, 1-2 years, 1-5 years, 2-5 years, 3-6 years, 3-8 years, 4-8 years, or 5-10 years.

[0274] In some embodiments, the promoter drives expression of at least one VENOM element for at least 1 month, 2 months, 3 months, 4 months, 5 months, 6 months, 7 months, 8 months, 9 months, 10 months, 11 months, 1 year, 2 years, 3 years 4 years, 5 years, 6 years, 7 years, 8 years, 9 years, 10 years, 11 years, 12 years, 13 years, 14 years, 15 years, 16 years, 17 years, 18 years, 19 years, 20 years, 21 years, 22 years, 23 years, 24 years, 25 years, 26 years, 27 years, 28 years, 29 years, 30 years, 31 years, 32 years, 33 years, 34 years, 35 years, 36 years, 37 years, 38 years, 39 years, 40 years, 41 years, 42 years, 43 years, 44 years, 45 years, 46 years, 47 years. 48 years. 49 years, 50 years, 55 years, 60 years, 65 years, or more than 65 years.

[0275] Promoters may be naturally occurring or non-naturally occurring. Non-limiting examples of promoters include viral promoters, plant promoters and mammalian promoters. In some embodiments, the promoters may be human promoters. In some embodiments, the promoter may be truncated.

[0276] Promoters which drive or promote expression in most tissues include, but are not limited to, human elongation factor 1α-subunit (EF1α), cytomegalovirus (CMV) immediate-early enhancer and/or promoter, chicken β-actin (CBA) and its derivative CAG, β glucuronidase (GUSB), or ubiquitin C (UBC). Tissue-specific expression elements can be used to restrict expression to certain cell types such as, but not limited to, muscle specific promoters, B cell promoters, monocyte promoters, leukocyte promoters, macrophage promoters, pancreatic acinar cell promoters, endothelial cell promoters, lung tissue promoters, astrocyte promoters, or nervous system promoters which can be used to restrict expression to neurons, astrocytes, or oligodendrocytes.

[0277] Non-limiting examples of muscle-specific promoters include mammalian muscle creatine kinase (MCK) promoter, mammalian desmin (DES) promoter, mammalian troponin I (TNN12) promoter, and mammalian skeletal alpha-actin (ASKA) promoter (see, e.g. U.S. Patent Publication US20110212529, the contents of which are herein incorporated by reference in their entirety)

[0278] Non-limiting examples of tissue-specific expression elements for neurons include neuron-specific enolase (NSE), platelet-derived growth factor (PDGF), platelet-derived growth factor B-chain (PDGF-β), synapsin (Syn), methyl-CpG binding protein 2 (MeCP2), Ca²⁺/calmodulin-dependent protein kinase II (CaMKII), metabotropic glutamate receptor 2 (mGluR2), neurofilament light (NFL) or heavy (NFH), β-globin minigene nβ2, preproenkephalin (PPE), enkephalin (Enk) and excitatory amino acid transporter 2 (EAAT2) promoters. Non-limiting examples of tissue-specific expression elements for astrocytes include glial fibrillary acidic protein (GFAP) and EAAT2 promoters. A non-limiting example of a tissue-specific expression element for oligodendrocytes includes the myelin basic protein (MBP) promoter.

[0279] In some embodiments, the promoter may be less than 1 kb. The promoter may have a length of 200, 210, 220, 230, 240, 250, 260, 270, 280, 290, 300, 310, 320, 330, 340, 350, 360, 370, 380, 390, 400, 410, 420, 430, 440, 450, 460, 470, 480, 490, 500, 510, 520, 530, 540, 550, 560, 570, 580, 590, 600, 610, 620, 630, 640, 650, 660, 670, 680, 690, 700, 710, 720, 730, 740, 750, 760, 770, 780, 790, 800, or more than 800 nucleotides. The promoter may have a length between 200-300, 200-400, 200-500, 200-600, 200-700, 200-800, 300-400, 300-500, 300-600, 300-700, 300-800, 400-500, 400-600, 400-700, 400-800, 500-600, 500-700, 500-800, 600-700, 600-800, or 700-800.

[0280] In some embodiments, the promoter may be a combination of two or more components of the same or different starting or parental promoters such as, but not limited to, CMV and CBA. Each component may have a length of 200, 210, 220, 230, 240, 250, 260, 270, 280, 290, 300, 310, 320, 330, 340, 350, 360, 370, 380, 381, 382, 383, 384, 385, 386, 387, 388, 389, 390, 400, 410, 420, 430, 440, 450, 460, 470, 480, 490, 500, 510, 520, 530, 540, 550, 560, 570, 580, 590, 600, 610, 620, 630, 640, 650, 660, 670, 680, 690, 700, 710, 720, 730, 740, 750, 760, 770, 780, 790, 800, or more than 800. Each component may have a length between 200-300, 200400, 200-500, 200-600, 200-700, 200-800, 300400, 300-500, 300-600, 300-700, 300-800, 400-500, 400-600, 400-700, 400-800, 500-600, 500-700, 500-800, 600-700, 600-800 or 700-800. In some embodiments, the promoter is a combination of a 382 nucleotide CMV-enhancer sequence and a 260 nucleotide CBA-promoter sequence.

[0281] In some embodiments, the vector genome comprises a ubiquitous promoter. Non-limiting examples of ubiquitous promoters include CMV, CBA (including derivatives CAG, CB6, CBh, etc.), EF-1α, PGK, UBC, GUSB (hGBp), and UCOE (promoter of HNRPA2B1-CBX3).

[0282] Yu et al. (Molecular Pain 2011, 7:63; the contents of which are herein incorporated by reference in their entirety) evaluated the expression of eGFP under the CAG, EF1α, PGK and UBC promoters in rat DRG cells and primary DRG cells using lentiviral vectors and found that UBC showed weaker expression than the other 3 promoters and only 10-12% glial expression was seen for all promoters. Soderblom et al. (E. Neuro 2015; the contents of which are herein incorporated by reference in its entirety) evaluated the expression of eGFP in AAV8 with CMV and UBC promoters and AAV2 with the CMV promoter after injection in the motor cortex. Intranasal administration of a plasmid containing a UBC or EF1α promoter showed a sustained airway expression greater than the expression with the CMV promoter (See e.g., Gill et al., Gene Therapy 2001, Vol. 8, 1539-1546; the contents of which are herein incorporated by reference in their entirety). Husain et al. (Gene Therapy 2009; the contents of which are herein incorporated by reference in its entirety) evaluated an HβH construct with a hGUSB promoter, an HSV-1LAT promoter and an NSE promoter and found that the HβH construct showed weaker expression than NSE in mouse brain. Passini and Wolfe (J. Virol. 2001, 12382-12392, the contents of which are herein incorporated by reference in its entirety) evaluated the long-term effects of the HβH vector following an intraventricular injection in neonatal mice and found that there was sustained expression for at least 1 year. Low expression in all brain regions was found by Xu et al. (Gene Therapy 2001, 8, 1323-1332; the contents of which are herein incorporated by reference in their entirety) when NFL and NFH promoters were used as compared to the CMV-lacZ, CMV-luc, EF, GFAP, hENK, nAChR, PPE, PPE+wpre, NSE (0.3 kb), NSE (1.8 kb) and NSE (1.8 kb+wpre). Xu et al. found that the promoter activity in descending order was NSE (1.8 kb), EF, NSE (0.3 kb), GFAP, CMV, hENK, PPE, NFL and NFH. NFL is a 650 nucleotide promoter and NFH is a 920-nucleotide promoter which are both absent in the liver but NFH is abundant in the sensory proprioceptive neurons, brain and spinal cord and NFH is present in the heart. Scn8a is a 470 nucleotide promoter which expresses throughout the DRG, spinal cord and brain with particularly high expression seen in the hippocampal neurons and cerebellar Purkinje cells, cortex, thalamus, and hypothalamus (See e.g., Drews et al. Identification of evolutionary conserved, functional noncoding elements in the promoter region of the sodium channel gene SCN8A, Mamm Genome (2007) 18:723-731; and Raymond et al. Expression of Alternatively Spliced Sodium Channel α-subunit genes, Journal of Biological Chemistry (2004) 279(44) 46234-46241; the contents of each of which are herein incorporated by reference in their entireties).

[0283] Any of promoters taught by the aforementioned Yu, Soderblom, Gill, Husain, Passini, Xu, Drews, or Raymond may be used in the present disclosures.

[0284] In some embodiments, the promoter is not cell specific.

[0285] In some embodiments, the promoter is a ubiquitin c (UBC) promoter. The UBC promoter may have a size of 300-350 nucleotides. As a non-limiting example, the UBC promoter is 332 nucleotides.

[0286] In some embodiments, the promoter is a β-glucuronidase (GUSB) promoter. The GUSB promoter may have a size of 350-400 nucleotides. As a non-limiting example, the GUSB promoter is 378 nucleotides.

[0287] In some embodiments, the promoter is a neurofilament light (NFL) promoter. The NFL promoter may have a size of 600-700 nucleotides. As a non-limiting example, the NFL promoter is 650 nucleotides.

[0288] In some embodiments, the promoter is a neurofilament heavy (NFH) promoter. The NFH promoter may have a size of 900-950 nucleotides. As a non-limiting example, the NFH promoter is 920 nucleotides.

[0289] In some embodiments, the promoter is a scn8a promoter. The scn8a promoter may have a size of 450-500 nucleotides. As a non-limiting example, the scn8a promoter is 470 nucleotides.

[0290] In some embodiments, the promoter is a phosphoglycerate kinase 1 (PGK) promoter.

[0291] In some embodiments, the promoter is a chicken β-actin (CBA) promoter, or a variant thereof.

[0292] In some embodiments, the promoter is a CB6 promoter.

[0293] In some embodiments, the promoter is a minimal CB promoter.

[0294] In some embodiments, the promoter is a cytomegalovirus (CMV) promoter.

[0295] In some embodiments, the promoter is a CAG promoter.

[0296] In some embodiments, the promoter is a GFAP promoter.

[0297] In some embodiments, the promoter is a synapsin promoter.

[0298] In some embodiments, the promoter is a liver or a skeletal muscle promoter. Non-limiting examples of liver promoters include human α-1-antitrypsin (hAAT) and thyroxine binding globulin (TBG). Non-limiting examples of skeletal muscle promoters include Desmin, MCK or synthetic C5-12.

[0299] In some embodiments, the promoter is an RNA pol III promoter. As a non-limiting example, the RNA pol III promoter is U6. As a non-limiting example, the RNA pol III promoter is H1.

[0300] In some embodiments, the vector genome comprises two promoters. As a non-limiting example, the promoters are an EF1α promoter and a CMV promoter.

[0301] In some embodiments, the vector genome comprises an enhancer element, a promoter and/or a 5′UTR intron. The enhancer element, also referred to herein as an “enhancer,” may be, but is not limited to, a CMV enhancer, the promoter may be, but is not limited to, a CMV, CBA, UBC, GUSB, NSE, Synapsin, McCP2, and GFAP promoter and the 5′UTR/intron may be, but is not limited to, SV40, and CBA-MVM. As a non-limiting example, the enhancer, promoter and/or intron used in combination may be: (1) CMV enhancer, CMV promoter, SV40 5′UTR intron; (2) CMV enhancer, CBA promoter, SV 40 5′UTR intron; (3) CMV enhancer, CBA promoter, CBA-MVM 5′UTR intron; (4) UBC promoter; (5) GUSB promoter; (6) NSE promoter; (7) Synapsin promoter; (8) MeCP2 promoter; and (9) GFAP promoter.

[0302] In some embodiments, the vector genome comprises an engineered promoter.

[0303] In another embodiment, the vector genome comprises a promoter from a naturally expressed protein.

### Vector Genome Component: Untranslated Regions (UTRs)

[0304] By definition, wild type untranslated regions (UTRs) of a gene are transcribed but not translated. Generally, the 5′ UTR starts at the transcription start site and ends at the start codon and the 3′ UTR starts immediately following the stop codon and continues until the termination signal for transcription.

[0305] Features typically found in abundantly expressed genes of specific target organs may be engineered into UTRs to enhance the stability and protein production. As a non-limiting example, a 5′ UTR from mRNA normally expressed in the liver (e.g., albumin, serum amyloid A, Apolipoprotein A/B/E, transferrin, alpha fetoprotein, erythropoietin, or Factor VIII) may be used in the vector genomes of the AAV particles and/or VAPs to enhance expression in hepatic cell lines or liver.

[0306] While not wishing to be bound by theory, wild-type 5′ untranslated regions (UTRs) include features which play roles in translation initiation. Kozak sequences, which are commonly known to be involved in the process by which the ribosome initiates translation of many genes, are usually included in 5′ UTRs. Kozak sequences have the consensus CCR(A/G)CCAUGG, where R is a purine (adenine or guanine) three bases upstream of the start codon (ATG), which is followed by another ‘G’.

[0307] In some embodiments, the 5′UTR in the vector genome includes a Kozak sequence.

[0308] In some embodiments, the 5′UTR in the vector genome does not include a Kozak sequence.

[0309] While not wishing to be bound by theory, wild-type 3′ UTRs are known to have stretches of Adenosines and Uridines embedded therein. These AU rich signatures are particularly prevalent in genes with high rates of turnover. Based on their sequence features and functional properties, the AU rich elements (AREs) can be separated into three classes (Chen et al, 1995, the contents of which are herein incorporated by reference in its entirety): Class I AREs, such as, but not limited to, c-Myc and MyoD, contain several dispersed copies of an AUUUA motif within U-rich regions. Class II AREs, such as, but not limited to, GM-CSF and TNF-α, possess two or more overlapping UUAUUUA(U/A)(U/A) nonamers. Class III ARES, such as, but not limited to, c-Jun and Myogenin, are less well defined. These U rich regions do not contain an AUUUA motif. Most proteins binding to the AREs are known to destabilize the messenger, whereas members of the ELAV family, most notably HuR, have been documented to increase the stability of mRNA. HuR binds to AREs of all the three classes. Engineering the HuR specific binding sites into the 3′ UTR of nucleic acid molecules will lead to HuR binding and thus, stabilization of the message in vivo.

[0310] Introduction, removal or modification of 3′ UTR AU rich elements (AREs) can be used to modulate the stability of polynucleotides. When engineering specific polynucleotides, e.g., payload regions of vector genomes, one or more copies of an ARE can be introduced to make polynucleotides less stable and thereby curtail translation and decrease production of the resultant protein. Likewise, AREs can be identified and removed or mutated to increase the intracellular stability and thus increase translation and production of the resultant protein.

[0311] In some embodiments, the 3′ UTR of the vector genome may include an oligo(dT) sequence for templated addition of a poly-A tail.

[0312] In some embodiments, the vector genome may include at least one miRNA seed, binding site or full sequence. microRNAs (or miRNA or miR) are 19-25 nucleotide noncoding RNAs that bind to the sites of nucleic acid targets and down-regulate gene expression either by reducing nucleic acid molecule stability or by inhibiting translation. A microRNA sequence comprises a “seed” region, i.e., a sequence in the region of positions 2-8 of the mature microRNA, which sequence has perfect Watson-Crick complementarity to the miRNA target sequence of the nucleic acid.

[0313] In some embodiments, the vector genome may be engineered to include, alter or remove at least one miRNA binding site, sequence, or seed region.

[0314] Any UTR from any gene known in the art may be incorporated into the vector genome of the AAV particle and/or VAP. These UTRs. or portions thereof, may be placed in the same orientation as in the gene from which they were selected, or they may be altered in orientation or location. In some embodiments, the UTR used in the vector genome of the AAV particle and/or VAP may be inverted, shortened, lengthened, made with one or more other 5′ UTRs or 3′ UTRs known in the art. As used herein, the term “altered” as it relates to a UTR, means that the UTR has been changed in some way in relation to a reference sequence. For example, a 3′ or 5′ UTR may be altered relative to a wild type or native UTR by the change in orientation or location as taught above or may be altered by the inclusion of additional nucleotides, deletion of nucleotides, swapping or transposition of nucleotides.

[0315] In some embodiments, the vector genome of the AAV particle and/or VAP comprises at least one artificial UTRs which is not a variant of a wild type UTR.

[0316] In some embodiments, the vector genome of the AAV particle and/or VAP comprises UTRs which have been selected from a family of transcripts whose proteins share a common function, structure, feature or property.

### Vector Genome Component: Polyadenylation Sequence

[0317] In some embodiments, the vector genome of the AAV particles and/or VAP of the present disclosure comprise at least one polyadenylation sequence. The vector genome of the AAV particle and/or VAP may comprise a polyadenylation sequence between the 3′ end of the payload coding sequence and the 5′ end of the 3′ITR.

[0318] In some embodiments, the polyadenylation sequence or “polyA sequence” may range from absent to about 500 nucleotides in length. The polyadenylation sequence may be, but is not limited to, 1, 2, 3, 4, 5, 6, 7, 8, 9, 10, 11, 12, 13, 14, 15, 16, 17, 18, 19, 20, 21, 22, 23, 24, 25, 26, 27, 28, 29, 30, 31, 32, 33, 34, 35, 36, 37, 38, 39, 40, 41, 42, 43, 44, 45, 46, 47, 48, 49, 50, 51, 52, 53, 54, 55, 56, 57, 58, 59, 60, 61, 62, 63, 64, 65, 66, 67, 68, 69, 70, 71, 72, 73, 74, 75, 76, 77, 78, 79, 80, 81, 82, 83, 84, 85, 86, 87, 88, 89, 90, 91, 92, 93, 94, 95, 96, 97, 98, 99, 100, 101, 102, 103, 104, 105, 106, 107, 108, 109, 110, 111,112, 113,114, 115, 116, 117, 118, 119, 120, 121, 122, 123, 124, 125, 126, 127, 128, 129, 130, 131, 132, 133, 134, 135, 136, 137, 138, 139, 140, 141, 142, 143, 144, 145, 146, 147, 148, 149, 150, 151, 152, 153, 154, 155, 156, 157, 158, 159, 160, 161, 162, 163, 164, 165, 166, 167, 168, 169, 170, 171, 172, 173, 174, 175, 176, 177, 178, 179, 180, 181, 182, 183, 184, 185, 186, 187, 188, 189, 190, 191, 192, 193, 194, 195, 196, 197, 198, 199, 200, 201, 202, 203, 204, 205, 206, 207, 208, 209, 210, 211, 212, 213, 214, 215, 216, 217, 218,219, 220, 221, 222, 223, 224, 225, 226, 227, 228, 229, 230, 231, 232, 233, 234, 235, 236, 237, 238, 239, 240, 241, 242, 243, 244, 245, 246, 247, 248, 249, 250, 251, 252, 253, 254, 255, 256, 257, 258, 259, 260, 261, 262, 263, 264, 265, 266, 267, 268, 269, 270, 271, 272, 273, 274, 275, 276, 277, 278, 279, 280, 281, 282, 283, 284, 285, 286, 287, 288, 289, 290, 291, 292, 293, 294, 295, 296, 297, 298, 299, 300, 301, 302, 303, 304, 305, 306, 307, 308, 309, 310, 311, 312, 313, 314, 315, 316, 317, 318, 319, 320, 321, 322, 323, 324, 325, 326, 327, 328, 329, 330, 331, 332, 333, 334, 335, 336, 337, 338, 339, 340, 341, 342, 343, 344, 345, 346, 347, 348, 349, 350, 351, 352, 353, 354, 355, 356, 357, 358, 359, 360, 361, 362, 363, 364, 365, 366, 367, 368, 369, 370, 371, 372, 373, 374, 375, 376, 377, 378, 379, 380, 381, 382, 383, 384, 385, 386, 387, 388, 389, 390, 391, 392, 393, 394, 395, 396, 397, 398, 399, 400, 401, 402, 403,404, 405, 406, 407,408, 409, 410, 411, 412, 413, 414, 415, 416, 417, 418, 419, 420, 421, 422, 423, 424, 425, 426, 427, 428, 429, 430, 431, 432, 433, 434, 435, 436, 437, 438, 439, 440, 441, 442, 443, 444, 445, 446, 447, 448, 449, 450, 451, 452, 453, 454, 455, 456, 457, 458, 459, 460, 461, 462, 463, 464, 465, 466, 467, 468, 469, 470, 471, 472, 473, 474, 475, 476, 477, 478, 479,480, 481, 482, 483, 484, 485, 486, 487, 488, 489, 490, 491, 492, 493, 494, 495, 496, 497, 498, 499, 500, 501, 502, 503, 504, 505, 506, 507, 508, 509, 510, 511, 512, 513, 514, 515, 516, 517, 518, 519, 520, 521, 522, 523, 524, 525, 526, 527, 528, 529, 530, 531, 532, 533, 534, 535, 536, 537, 538, 539, 540, 541, 542, 543, 544, 545, 546, 547, 548, 549, 550, 551, 552, 553, 554, 555, 556, 557, 558, 559, 560, 561, 562, 563, 564, 565, 566, 567, 568, 569, 570, 571, 572, 573, 574, 575, 576, 577, 578, 579, 580, 581, 582, 583, 584, 585, 586, 587, 588, 589, 590, 591, 592, 593, 594, 595, 596, 597, 598, 599, and 600 nucleotides in length.

[0319] In some embodiments, the polyadenylation sequence is 50-100 nucleotides in length.

[0320] In some embodiments, the polyadenylation sequence is 50-150 nucleotides in length.

[0321] In some embodiments, the polyadenylation sequence is 50-160 nucleotides in length.

[0322] In some embodiments, the polyadenylation sequence is 50-200 nucleotides in length.

[0323] In some embodiments, the polyadenylation sequence is 60-100 nucleotides in length.

[0324] In some embodiments, the polyadenylation sequence is 60-150 nucleotides in length.

[0325] In some embodiments, the polyadenylation sequence is 60-160 nucleotides in length.

[0326] In some embodiments, the polyadenylation sequence is 60-200 nucleotides in length.

[0327] In some embodiments, the polyadenylation sequence is 70-100 nucleotides in length.

[0328] In some embodiments, the polyadenylation sequence is 70-150 nucleotides in length.

[0329] In some embodiments, the polyadenylation sequence is 70-160 nucleotides in length.

[0330] In some embodiments, the polyadenylation sequence is 70-200 nucleotides in length.

[0331] In some embodiments, the polyadenylation sequence is 80-100 nucleotides in length.

[0332] In some embodiments, the polyadenylation sequence is 80-150 nucleotides in length.

[0333] In some embodiments, the polyadenylation sequence is 80-160 nucleotides in length.

[0334] In some embodiments, the polyadenylation sequence is 80-200 nucleotides in length.

[0335] In some embodiments, the polyadenylation sequence is 90-100 nucleotides in length.

[0336] In some embodiments, the polyadenylation sequence is 90-150 nucleotides in length.

[0337] In some embodiments, the polyadenylation sequence is 90-160 nucleotides in length.

[0338] In some embodiments, the polyadenylation sequence is 90-200 nucleotides in length.

[0339] In some embodiments, the polyadenylation sequence is 127 nucleotides in length.

[0340] In some embodiments, the polyadenylation sequence is 477 nucleotides in length.

[0341] In some embodiments, the polyadenylation sequence is 552 nucleotides in length.

### Vector Genome Component: Linkers

[0342] Vector genomes may be engineered with one or more spacer or linker regions to separate coding or non-coding regions.

[0343] In some embodiments, the payload region of the AAV particle and/or VAP may optionally encode one or more linker sequences. In some cases, the linker may be a peptide linker that may be used to connect the polypeptides encoded by the payload region. Some peptide linkers may be cleaved after expression to separate the polypeptides. Linker cleavage may be enzymatic. In some cases, linkers comprise an enzymatic cleavage site to facilitate intracellular or extracellular cleavage. Some payload regions encode linkers that interrupt polypeptide synthesis during translation of the linker sequence from an mRNA transcript. Such linkers may facilitate the translation of separate protein domains from a single transcript. In some cases, two or more linkers are encoded by a payload region of the vector genome. Non-limiting examples of linkers that may be encoded by the payload region of an AAV particle and/or VAP vector genome are given in Table 2.

TABLE 2
Linkers

| Linker | | | SEQ |
|---|---|---|---|
| ID | Description | Length | ID NO |
| Linker1 | Furin | 12 | 1724 |
| Linker2 | Furin | 12 | 1725 |
| Linker3 | T2A | 54 | 1726 |
| Linker4 | F2A | 75 | 1727 |
| Linker5 | P2A | 66 | 1728 |
| Linker6 | G4S (“G4S” disclosed as | 18 | 1729 |
| | SEQ ID NO: 1740) | | |
| Linker7 | G4S3 (“G4S3” disclosed as | 45 | 1730 |
| | SEQ ID NO: 1741) | | |
| Linker8 | G4S5 (“G4S5” disclosed as | 75 | 1731 |
| | SEQ ID NO: 1742) | | |
| Linker9 | IRES | 609 | 1732 |
| Linker10 | IRES-2 | 623 | 1733 |
| Linker11 | hIgG2 hinge | 54 | 1734 |
| Linker12 | hIgG3 hinge | 108 | 1735 |
| Linker13 | hIgG3-2 hinge | 153 | 1736 |
| Linker14 | hIgG3-3 hinge | 198 | 1737 |
| Linker15 | msiGG-1 hinge | 45 | 1738 |
| Linker16 | msiGG1 hinge | 18 | 1739 |

[0344] Some payload regions encode linkers comprising furin cleavage sites. Furin is a calcium dependent serine endoprotease that cleaves proteins just downstream of a basic amino acid target sequence (Arg-X-(Arg/Lys)-Arg) (Thomas, G., 2002. Nature Reviews Molecular Cell Biology 3(10): 753-66; the contents of which are herein incorporated by reference in its entirety). Furin is enriched in the trans-golgi network where it is involved in processing cellular precursor proteins. Furin also plays a role in activating a number of pathogens. This activity can be taken advantage of for expression of polypeptides.

[0345] 2A peptides are small “self-cleaving” peptides (18-22 amino acids) derived from viruses such as foot-and-mouth disease virus (F2A), porcine teschovirus-1 (P2A). Thoseaasigna virus (T2A), or equine rhinitis A virus (E2A). The 2A designation refers specifically to a region of picornavirus polyproteins that lead to a ribosomal skip at the glycyl-prolyl bond in the C-terminus of the 2A peptide (Kim, J. H. et al., 2011. PLoS One 6(4): e18556; the contents of which are herein incorporated by reference in its entirety). This skip results in a cleavage between the 2A peptide and its immediate downstream peptide. As opposed to IRES linkers, 2A peptides generate stoichiometric expression of proteins flanking the 2A peptide and their shorter length can be advantageous in generating viral expression vectors.

[0346] Internal ribosomal entry site (IRES) is a nucleotide sequence (>500 nucleotides) that allows for initiation of translation in the middle of an mRNA sequence (Kim, J. H. et al., 2011. PLoS One 6(4): e18556; the contents of which are herein incorporated by reference in its entirety). Use of an IRES sequence ensures co-expression of genes before and after the IRES, though the sequence following the IRES may be transcribed and translated at lower levels than the sequence preceding the IRES sequence.

[0347] In some embodiments, the payload region may encode one or more linkers comprising cathepsin, matrix metalloproteinases or legumain cleavage sites. Such linkers are described e.g. by Cizeau and Macdonald in International Publication No. WO2008052322, the contents of which are herein incorporated in their entirety. Cathepsins are a family of proteases with unique mechanisms to cleave specific proteins. Cathepsin B is a cysteine protease and cathepsin D is an aspartyl protease. Matrix metalloproteinases are a family of calcium-dependent and zinc-containing endopeptidases. Legumain is an enzyme catalyzing the hydrolysis of (-Asn-Xaa-) bonds of proteins and small molecule substrates.

[0348] In some embodiments, payload regions may encode linkers that are not cleaved. Such linkers may include a simple amino acid sequence, such as a glycine rich sequence. In some cases, linkers may comprise flexible peptide linkers comprising glycine and serine residues. The linker may comprise flexible peptide linkers of different lengths, e.g. n×G4S, where n=1-10 (SEQ ID NO: 1743), and the length of the encoded linker varies between 5 and 50 amino acids. In a non-limiting example, the linker may be 5×G4S (SEQ ID NO: 1742). These flexible linkers are small and without side chains, so they tend not to influence secondary protein structure while providing a flexible linker between antibody segments (George, R. A., et al., 2002. Protein Engineering 15(11): 871-9; Huston. J. S. et al., 1988. PNAS 85:5879-83; and Shan, D. et al., 1999. Journal of Immunology. 162(11):6589-95; the contents of each of which are herein incorporated by reference in their entirety). Furthermore, the polarity of the serine residues improves solubility and prevents aggregation problems.

[0349] In some embodiments, payload regions may encode small and unbranched serine-rich peptide linkers, such as those described by Huston et al. in U.S. Pat. No. 5,525,491, the contents of which are herein incorporated in their entirety. Polypeptides encoded by the payload region, linked by serine-rich linkers, have increased solubility.

[0350] In some embodiments, payload regions may encode artificial linkers, such as those described by Whitlow and Filpula in U.S. Pat. No. 5,856,456 and Ladner et al. in U.S. Pat. No. 4,946,778, the contents of each of which are herein incorporated by their entirety.

[0351] In some embodiments, the payload region encodes at least one G4S3 linker (“G4S3” disclosed as SEQ ID NO: 1741).

[0352] In some embodiments, the payload region encodes at least one G4S linker (“G4S” disclosed as SEQ ID NO: 1740).

[0353] In some embodiments, the payload region encodes at least one furin site.

[0354] In some embodiments, the payload region encodes at least one T2A linker.

[0355] In some embodiments, the payload region encodes at least one F2A linker.

[0356] In some embodiments, the payload region encodes at least one P2A linker.

[0357] In some embodiments, the payload region encodes at least one IRES sequence.

[0358] In some embodiments, the payload region encodes at least one G4S5 linker (“G4S5” disclosed as SEQ ID NO: 1742).

[0359] In some embodiments, the payload region encodes at least one furin and one 2A linker.

[0360] In some embodiments, the payload region encodes at least one hinge region. As a non-limiting example, the hinge is an IgG hinge.

[0361] In some embodiments, the linker region may be 1-50, 1-100, 50-100, 50-150, 100-150, 100-200, 150-200, 150-250, 200-250, 200-300, 250-300, 250-350, 300-350, 300-400, 350-400, 350-450, 400-450, 400-500, 450-500, 450-550, 500-550, 500-600, 550-600, 550-650, or 600-650 nucleotides in length. The linker region may have a length of 1, 2, 3, 4, 5, 6, 7, 8, 9, 10, 11, 12, 13, 14, 15, 16, 17, 18, 19, 20, 21, 22, 23, 24, 25, 26, 27, 28, 29, 30, 31, 32, 33, 34, 35, 36, 37, 38, 39, 40, 41, 42, 43, 44, 45, 46, 47, 48, 49, 50, 51, 52, 53, 54, 55, 56, 57, 58, 59, 60, 61, 62, 63, 64, 65, 66, 67, 68, 69, 70, 71, 72, 73, 74, 75, 76, 77, 78, 79, 80, 81, 82, 83, 84, 85, 86, 87, 88, 89, 90, 91, 92, 93, 94, 95, 96, 97, 98, 99, 100, 101, 102, 103, 104, 105, 106, 107, 108, 109, 110, 115, 120, 125, 130, 135, 140, 145, 150, 151, 152, 153, 154, 155, 156, 157, 158, 159, 160, 165, 170, 171, 172, 173, 174, 175, 176, 177, 178, 179, 180, 185, 190, 191, 192, 193, 194, 195, 196, 197, 198, 199, 200, 210, 220, 230, 240, 250, 260, 270, 280, 290, 300, 310, 320, 330, 340, 350, 360, 370, 380, 390, 400, 410, 420, 430, 440, 450, 460, 470, 480, 490, 500, 510, 520, 530, 540, 550, 560, 570, 580, 590, 600, 601, 602, 603, 604, 605, 606, 607, 608, 609, 610, 611, 612, 613, 614, 615, 616, 617, 618, 619, 620, 621, 622, 623, 624, 625, 626, 627, 628, 629, 630, 631, 632, 633, 634, 635, 640, 650 or greater than 650. In some embodiments, the linker region may be 12 nucleotides in length. In some embodiments, the linker region may be 18 nucleotides in length. In some embodiments, the linker region may be 45 nucleotides in length. In some embodiments, the linker region may be 54 nucleotides in length. In some embodiments, the linker region may be 66 nucleotides in length. In some embodiments, the linker region may be 75 nucleotides in length. In some embodiments, the linker region may be 78 nucleotides in length. In some embodiments, the linker region may be 87 nucleotides in length. In some embodiments, the linker region may be 108 nucleotides in length. In some embodiments, the linker region may be 153 nucleotides in length. In some embodiments, the linker region may be 198 nucleotides in length. In some embodiments, the linker region may be 623 nucleotides in length.

### Vector Genome Component: Introns

[0362] In some embodiments, the payload region comprises at least one element to enhance the expression such as one or more introns or portions thereof. Non-limiting examples of introns include, MVM (67-97 bps), F.IX truncated intron 1 (300 bps), pi-globin SD/immunoglobulin heavy chain splice acceptor (250 bps), adenovirus splice donor/immunoglobin splice acceptor (500 bps), SV40 late splice donor/splice acceptor (19S/16S) (180 bps) and hybrid adenovirus splice donor/IgG splice acceptor (230 bps).

[0363] In some embodiments, the intron or intron portion may be 1-100, 100-500, 500-1000, or 1000-1500 nucleotides in length. The intron may have a length of 10, 15, 20, 30, 40, 50, 60, 70, 80, 90, 100, 110, 120, 130, 140, 150, 160, 170, 171, 172, 173, 174, 175, 176, 177, 178, 179, 180, 190, 200, 210, 220, 230, 240, 250, 260, 270, 280, 290, 300, 310, 320, 330, 340, 350, 360, 370, 380, 390, 400, 410, 420, 430, 440, 450, 460, 470, 480, 490, 500, or greater than 500. The intron may have a length between 80-100, 80-120, 80-140, 80-160, 80-180, 80-200, 80-250, 80-300, 80-350, 80-400, 80-450, 80-500, 200-300, 200-400, 200-500, 300-400, 300-500, or 400-500. In some embodiments, the intron may be 15 nucleotides in length. In some embodiments, the intron may be 32 nucleotides in length. In some embodiments, the intron may be 41 nucleotides in length. In some embodiments, the intron may be 53 nucleotides in length. In some embodiments, the intron may be 54 nucleotides in length. In some embodiments, the intron may be 59 nucleotides in length. In some embodiments, the intron may be 73 nucleotides in length. In some embodiments, the intron may be 102 nucleotides in length. In some embodiments, the intron may be 134 nucleotides in length. In some embodiments, the intron may be 168 nucleotides in length. In some embodiments, the intron may be 172 nucleotides in length. In some embodiments, the intron may be 347 nucleotides in length. In some embodiments, the intron may be 1074 nucleotides in length.

[0364] Any, or all components of a vector genome may be modified or optimized to improve expression or targeting of the payload. Such components include, but are not limited to, intron, signal peptide sequences, VENOM element, linkers, cleavage sites, polyadenylation sequences, stuffer sequences, other regulatory sequences, and/or the backbone of the ITR to ITR sequence.

### Payloads

[0365] The AAV particles and/or VAPs of the present disclosure comprise at least one payload region. As used herein, “payload” or “payload region” refers to one or more polynucleotides or polynucleotide regions encoded by or within a vector genome or an expression product of such polynucleotide or polynucleotide region, e.g., a transgene, a polynucleotide encoding a polypeptide or multi-polypeptide or a modulatory nucleic acid or regulatory nucleic acid. Payloads of the present disclosure typically VENOM elements or fragments or variants thereof.

[0366] The payload region may be constructed in such a way as to reflect a region similar to or mirroring the natural organization of an mRNA.

[0367] The payload region may comprise a combination of coding and non-coding nucleic acid sequences.

[0368] In some embodiments, the AAV payload region may encode a coding or non-coding RNA.

[0369] In some embodiments, the AAV particle and/or VAP comprises a vector genome with a payload region comprising nucleic acid sequences encoding more than VENOM element. In such an embodiment, a vector genome encoding more than one polypeptide may be replicated and packaged into a viral particle. A target cell transduced with a viral particle comprising more than one polypeptide may express each of the polypeptides in a single cell.

[0370] In some embodiments, the payload region may comprise at least one inverted terminal repeat (ITR), a promoter region, an intron region, and a coding region.

[0371] Where the AAV particle and/or VAP payload region encodes a polypeptide, the polypeptide may be a peptide or protein. A protein encoded by the AAV particle and/or VAP payload region may comprise a secreted protein, an intracellular protein, an extracellular protein, and/or a membrane protein. The encoded proteins may be structural or functional. In addition to the VENOM elements, proteins encoded by the payload region may include, in combination, certain mammalian proteins involved in immune system regulation. The AAV vector genomes encoding polypeptides described herein may be useful in the fields of human disease, viruses, infections, veterinary applications and a variety of in vivo and in vitro settings.

[0372] In some embodiments, the AAV particles and/or VAPs are useful in the field of medicine for the treatment, prophylaxis, palliation, or amelioration of neurological diseases and/or disorders.

[0373] In some embodiments, the payload region of the AAV particle comprises one or more nucleic acid sequences encoding VENOM elements, variants or fragments thereof.

[0374] In some embodiments, the payload region of the AAV particle comprises one or more nucleic acid sequences encoding one or more of the VENOM elements, or variants or fragments thereof. As used herein, “VENOM polynucleotide” refers to a nucleic acid sequence encoding VENOM element.

[0375] In some embodiments, the AAV particles or VAPs may comprise a vector genome, wherein one or more components may be codon-optimized. Codon-optimization may be achieved by any method known to one with skill in the art such as, but not limited to, by a method according to Genescript, EMBOSS, Bioinformatics, NUS, NUS2, Geneinfinity, IDT, NUS3, GregThatcher, Insilico, Molbio, N2P, Snapgene, and/or VectorNTI. Antibody heavy and/or light chain sequences within the same vector genome may be codon-optimized according to the same or according to different methods.

### The Nature of the Polypeptides and Variants

[0376] VENOM elements by payload regions of the vector genomes may be translated as a whole polypeptide, a plurality of polypeptides or fragments of polypeptides, which independently may be encoded by one or more nucleic acids, fragments of nucleic acids or variants of any of the aforementioned. As used herein, “polypeptide” means a polymer of amino acid residues (natural or unnatural) linked together most often by peptide bonds. The term, as used herein, refers to proteins, polypeptides, and peptides of any size, structure, or function. In some instances, the polypeptide encoded is smaller than about 50 amino acids and the polypeptide is then termed a peptide. If the polypeptide is a peptide, it will be at least about 2, 3, 4, or at least 5 amino acid residues long. Thus, polypeptides include gene products, naturally occurring polypeptides, synthetic polypeptides, homologs, orthologs, paralogs, fragments and other equivalents, variants, and analogs of the foregoing. A polypeptide may be a single molecule or may be a multi-molecular complex such as a dimer, trimer or tetramer. They may also comprise single chain or multichain polypeptides and may be associated or linked. The term polypeptide may also apply to amino acid polymers in which one or more amino acid residues are an artificial chemical analogue of a corresponding naturally occurring amino acid.

[0377] The term “polypeptide variant” refers to molecules which differ in their amino acid sequence from a native or reference sequence. The amino acid sequence variants may possess substitutions, deletions, and/or insertions at certain positions within the amino acid sequence, as compared to a native or reference sequence. Ordinarily, variants will possess at least about 50% identity (homology) to a native or reference sequence, and preferably, they will be at least about 80%, more preferably at least about 90% identical (homologous) to a native or reference sequence.

[0378] In some embodiments “variant mimics” are provided. As used herein, the term “variant mimic” is one which contains one or more amino acids which would mimic an activated sequence. For example, glutamate may serve as a mimic for phosphoro-threonine and/or phosphoro-serine. Alternatively, variant mimics may result in deactivation or in an inactivated product containing the mimic, e.g., phenylalanine may act as an inactivating substitution for tyrosine; or alanine may act as an inactivating substitution for serine.

[0379] The term “amino acid sequence variant” refers to molecules with some differences in their amino acid sequences as compared to a native or starting sequence. The amino acid sequence variants may possess substitutions, deletions, and/or insertions at certain positions within the amino acid sequence. “Native” or “starting” sequence should not be confused with a wild type sequence. As used herein, a native or starting sequence is a relative term referring to an original molecule against which a comparison may be made. “Native” or “starting” sequences or molecules may represent the wild-type (that sequence found in nature) but do not have to be the wild-type sequence.

[0380] Ordinarily, variants will possess at least about 70% homology to a native sequence, and preferably, they will be at least about 80%, more preferably at least about 90% homologous to a native sequence. “Homology” as it applies to amino acid sequences is defined as the percentage of residues in the candidate amino acid sequence that are identical with the residues in the amino acid sequence of a second sequence after aligning the sequences and introducing gaps, if necessary, to achieve the maximum percent homology. Methods and computer programs for the alignment are well known in the art. It is understood that homology depends on a calculation of percent identity but may differ in value due to gaps and penalties introduced in the calculation.

[0381] By “homologs” as it applies to amino acid sequences is meant the corresponding sequence of other species having substantial identity to a second sequence of a second species.

[0382] “Analogs” is meant to include polypeptide variants which differ by one or more amino acid alterations, e.g., substitutions, additions, or deletions of amino acid residues that still maintain the properties of the parent polypeptide.

[0383] Sequence tags or amino acids, such as one or more lysines, can be added to the peptide sequences (e.g., at the N-terminal or C-terminal ends). Sequence tags can be used for peptide purification or localization. Lysines can be used to increase peptide solubility or to allow for biotinylation. Alternatively, amino acid residues located at the carboxy and amino terminal regions of the amino acid sequence of a peptide or protein may optionally be deleted providing for truncated sequences. Certain amino acids (e.g., C-terminal or N-terminal residues) may alternatively be deleted depending on the use of the sequence, as for example, expression of the sequence as part of a larger sequence which is soluble, or linked to a solid support.

[0384] “Substitutional variants” when referring to proteins are those that have at least one amino acid residue in a native or starting sequence removed and a different amino acid inserted in its place at the same position. The substitutions may be single, where only one amino acid in the molecule has been substituted, or they may be multiple, where two or more amino acids have been substituted in the same molecule.

[0385] As used herein the term “conservative amino acid substitution” refers to the substitution of an amino acid that is normally present in the sequence with a different amino acid of similar size, charge, or polarity. Examples of conservative substitutions include the substitution of a non-polar (hydrophobic) residue such as isoleucine, valine, and leucine for another non-polar residue. Likewise, examples of conservative substitutions include the substitution of one polar (hydrophilic) residue for another such as between arginine and lysine, between glutamine and asparagine, and between glycine and serine. Additionally, the substitution of a basic residue such as lysine, arginine, or histidine for another, or the substitution of one acidic residue such as aspartic acid or glutamic acid for another acidic residue are additional examples of conservative substitutions. Examples of non-conservative substitutions include the substitution of a non-polar (hydrophobic) amino acid residue such as isoleucine, valine, leucine, alanine, methionine for a polar (hydrophilic) residue such as cysteine, glutamine, glutamic acid or lysine and/or a polar residue for a non-polar residue.

[0386] “Insertional variants” when referring to proteins are those with one or more amino acids inserted immediately adjacent to an amino acid at a particular position in a native or starting sequence. “Immediately adjacent” to an amino acid means connected to either the alpha-carboxy or alpha-amino functional group of the amino acid.

[0387] “Deletional variants” when referring to proteins, are those with one or more amino acids in the native or starting amino acid sequence removed. Ordinarily, deletional variants will have one or more amino acids deleted in a particular region of the molecule.

[0388] As used herein, the term “derivative” is used synonymously with the term “variant” and refers to a molecule that has been modified or changed in any way relative to a reference molecule or starting molecule. In some embodiments, derivatives include native or starting proteins that have been modified with an organic proteinaceous or non-proteinaceous derivatizing agent, and post-translational modifications. Covalent modifications are traditionally introduced by reacting targeted amino acid residues of the protein with an organic derivatizing agent that is capable of reacting with selected side-chains or terminal residues, or by harnessing mechanisms of post-translational modifications that function in selected recombinant host cells. The resultant covalent derivatives are useful in programs directed at identifying residues important for biological activity, for immunoassays, or for the preparation of anti-protein antibodies for immunoaffinity purification of the recombinant glycoprotein. Such modifications are within the ordinary skill in the art and are performed without undue experimentation.

[0389] Certain post-translational modifications are the result of the action of recombinant host cells on the expressed polypeptide. Glutaminyl and asparaginyl residues are frequently post-translationally deamidated to the corresponding glutamyl and aspartyl residues. Alternatively, these residues are deamidated under mildly acidic conditions. Either form of these residues may be present in the proteins used in accordance with the present disclosure.

[0390] Other post-translational modifications include hydroxylation of proline and lysine, phosphorylation of hydroxyl groups of seryl or threonyl residues, methylation of the alpha-amino groups of lysine, arginine, and histidine side chains (T. E. Creighton, Proteins: Structure and Molecular Properties, W.H. Freeman & Co., San Francisco, pp. 79-86 (1983)).

[0391] “Features” when referring to proteins are defined as distinct amino acid sequence-based components of a molecule. Features of the proteins of the present disclosure include surface manifestations, local conformational shape, folds, loops, half-loops, domains, half-domains, sites, termini or any combination thereof.

[0392] As used herein when referring to proteins the term “surface manifestation” refers to a polypeptide-based component of a protein appearing on an outermost surface.

[0393] As used herein when referring to proteins the term “local conformational shape” means a polypeptide based structural manifestation of a protein which is located within a definable space of the protein.

[0394] As used herein when referring to proteins the term “fold” means the resultant conformation of an amino acid sequence upon energy minimization. A fold may occur at the secondary or tertiary level of the folding process. Examples of secondary level folds include beta sheets and alpha helices. Examples of tertiary folds include domains and regions formed due to aggregation or separation of energetic forces. Regions formed in this way include hydrophobic and hydrophilic pockets, and the like.

[0395] As used herein the term “turn” as it relates to protein conformation means a bend which alters the direction of the backbone of a peptide or polypeptide and may involve one, two, three or more amino acid residues.

[0396] As used herein when referring to proteins the term “loop” refers to a structural feature of a peptide or polypeptide which reverses the direction of the backbone of a peptide or polypeptide and comprises four or more amino acid residues. Oliva et al. have identified at least 5 classes of protein loops (J. Mol Biol 266 (4): 814-830; 1997).

[0397] As used herein when referring to proteins the term “half-loop” refers to a portion of an identified loop having at least half the number of amino acid residues as the loop from which it is derived. It is understood that loops may not always contain an even number of amino acid residues. Therefore, in those cases where a loop contains or is identified to comprise an odd number of amino acids, a half-loop of the odd-numbered loop will comprise the whole number portion or next whole number portion of the loop (number of amino acids of the loop/2+/−0.5 amino acids). For example, a loop identified as a 7-amino acid loop could produce half-loops of 3 amino acids or 4 amino acids (7/2=3.5+/−0.5 being 3 or 4).

[0398] As used herein when referring to proteins the term “domain” refers to a motif of a polypeptide having one or more identifiable structural or functional characteristics or properties (e.g., binding capacity, serving as a site for protein-protein interactions).

[0399] As used herein when referring to proteins the term “half-domain” means portion of an identified domain having at least half the number of amino acid residues as the domain from which it is derived. It is understood that domains may not always contain an even number of amino acid residues. Therefore, in those cases where a domain contains or is identified to comprise an odd number of amino acids, a half-domain of the odd-numbered domain will comprise the whole number portion or next whole number portion of the domain (number of amino acids of the domain/2+/−0.5 amino acids). For example, a domain identified as a 7-amino acid domain could produce half-domains of 3 amino acids or 4 amino acids (7/2=3.5+/−0.5 being 3 or 4). It is also understood that sub-domains may be identified within domains or half-domains, these subdomains possessing less than all of the structural or functional properties identified in the domains or half domains from which they were derived. It is also understood that the amino acids that comprise any of the domain types herein need not be contiguous along the backbone of the polypeptide (i.e., nonadjacent amino acids may fold structurally to produce a domain, half-domain or subdomain).

[0400] As used herein when referring to proteins the terms “site” as it pertains to amino acid-based embodiments is used synonymous with “amino acid residue” and “amino acid side chain”. A site represents a position within a peptide or polypeptide that may be modified, manipulated, altered, derivatized or varied within the polypeptide-based molecules of the present disclosure.

[0401] As used herein the terms “termini or terminus” when referring to proteins refers to an extremity of a peptide or polypeptide. Such extremity is not limited only to the first or final site of the peptide or polypeptide but may include additional amino acids in the terminal regions. The polypeptide-based molecules of the present disclosure may be characterized as having both an N-terminus (terminated by an amino acid with a free amino group (NH2)) and a C-terminus (terminated by an amino acid with a free carboxyl group (COOH)). Proteins are in some cases made up of multiple polypeptide chains brought together by disulfide bonds or by non-covalent forces (multimers, oligomers). These sorts of proteins will have multiple N- and C-termini. Alternatively, the termini of the polypeptides may be modified such that they begin or end, as the case may be, with a non-polypeptide-based moiety such as an organic conjugate.

[0402] Once any of the features have been identified or defined as a component of a molecule, any of several manipulations and/or modifications of these features may be performed by moving, swapping, inverting, deleting, randomizing, or duplicating. Furthermore, it is understood that manipulation of features may result in the same outcome as a modification to the molecules. For example, a manipulation which involves deleting a domain would result in the alteration of the length of a molecule just as modification of a nucleic acid to encode less than a full-length molecule would.

[0403] Modifications and manipulations can be accomplished by methods known in the art such as site directed mutagenesis. The resulting modified molecules may then be tested for activity using in vitro or in vivo assays such as those described herein, or any other suitable screening assay known in the art.

### AAV Production

[0404] The present disclosure provides methods for the generation of parvoviral particles, e.g. AAV particles, by vector genome replication in a viral replication cell.

[0405] In accordance with the disclosure, the vector genome comprising at least one VENOM element or fragment thereof, will be incorporated into the AAV particle produced in the viral replication cell. Methods of making AAV particles are well known in the art and are described in e.g., U.S. Pat. Nos. 6,204,059, 5,756,283, 6,258,595, 6,261,551, 6,270,996, 6,281,010, 6,365,394, 6,475,769, 6,482,634, 6,485,966, 6,943,019, 6,953,690, 7,022,519, 7,238,526, 7,291,498 and 7,491,508, 5,064,764, 6,194,191, 6,566,118, 8,137,948; or International Publication Nos. WO1996039530, WO1998010088, WO1999014354, WO1999015685, WO1999047691, WO2000055342, WO2000075353, and WO2001023597; Methods In Molecular Biology, ed. Richard, Humana Press, N J (1995); O'Reilly et al., Baculovirus Expression Vectors, A Laboratory Manual, Oxford Univ. Press (1994); Samulski et al., J. Vir. 63:3822-8 (1989); Kajigaya et al., Proc. Nat'l. Acad. Sci. USA 88: 4646-50 (1991); Ruffing et al., J. Vir. 66:6922-30 (1992); Kimbauer et al., Vir., 219:37-44 (1996); Zhao et al., Vir. 272:382-93 (2000); the contents of each of which are herein incorporated by reference in their entirety. In some embodiments, the AAV particles are made using the methods described in WO2015191508, the contents of which are herein incorporated by reference in their entirety.

[0406] Viral replication cells commonly used for production of recombinant AAV viral vectors include but are not limited to 293 cells, COS cells, HeLa cells, KB cells, and other mammalian cell lines as described in U.S. Pat. Nos. 6,156,303, 5,387,484, 5,741,683, 5,691,176, and 5,688,676; U.S. patent publication No. 2002/0081721, and International Patent Publication Nos. WO 00/47757, WO 00/24916, and WO 96/17947, the contents of each of which are herein incorporated by reference in their entireties.

[0407] In some embodiments, the AAV particles of the present disclosure may be produced in insect cells (e.g., Sf9 cells).

[0408] In some embodiments, the AAV particles of the present disclosure may be produced using triple transfection.

[0409] In some embodiments, the AAV particles of the present disclosure may be produced in mammalian cells.

[0410] In some embodiments, the AAV particles of the present disclosure may be produced by triple transfection in mammalian cells.

[0411] In some embodiments, the AAV particles of the present disclosure may be produced by triple transfection in HEK293 cells.

[0412] The present disclosure provides a method for producing an AAV particle comprising the steps of: 1) co-transfecting competent bacterial cells with a bacmid vector and either a viral construct vector and/or AAV payload construct vector, 2) isolating the resultant viral construct expression vector and AAV payload construct expression vector and separately transfecting viral replication cells, 3) isolating and purifying resultant payload and viral construct particles comprising viral construct expression vector or AAV payload construct expression vector, 4) co-infecting a viral replication cell with both the AAV payload and viral construct particles comprising viral construct expression vector or AAV payload construct expression vector. 5) harvesting and purifying the viral particle comprising a parvovector genome.

[0413] In some embodiments, the present disclosure provides a method for producing an AAV particle comprising the steps of 1) simultaneously co-transfecting mammalian cells, such as, but not limited to HEK293 cells, with a payload region, a construct expressing rep and cap genes and a helper construct, 2) harvesting and purifying the AAV particle comprising a vector genome.

[0414] In some embodiments, the viral construct vector(s) used for AAV production may contain a nucleotide sequence encoding the AAV capsid proteins where the initiation codon of the AAV VP1 capsid protein is a non-ATG, i.e., a suboptimal initiation codon, allowing the expression of a modified ratio of the viral capsid proteins in the production system, to provide improved infectivity of the host cell. In a non-limiting example, a viral construct vector may contain a nucleic acid construct comprising a nucleotide sequence encoding AAV VP1, VP2, and VP3 capsid proteins, wherein the initiation codon for translation of the AAV VP1 capsid protein is CTG, TTG, or GTG, as described in U.S. Pat. No. 8,163,543, the contents of which are herein incorporated by reference in its entirety.

[0415] In some embodiments, the viral construct vector(s) used for AAV production may contain a nucleotide sequence encoding the AAV rep proteins where the initiation codon of the AAV rep protein or proteins is a non-ATG. In some embodiments, a single coding sequence is used for the Rep78 and Rep52 proteins, wherein initiation codon for translation of the Rep78 protein is a suboptimal initiation codon, selected from the group consisting of ACG, TTG, CTG and GTG, that effects partial exon skipping upon expression in insect cells, as described in U.S. Pat. No. 8,512,981, the contents of which is herein incorporated by reference in its entirety, for example to promote less abundant expression of Rep78 as compared to Rep52, which may be advantageous in that it promotes high vector yields.

[0416] In some embodiments, the vector genome of the AAV particle optionally encodes a selectable marker. The selectable marker may comprise a cell-surface marker, such as any protein expressed on the surface of the cell including, but not limited to receptors, CD markers, lectins, integrins, or truncated versions thereof.

[0417] In some embodiments, selectable marker reporter genes are selected from those described in International Application No. WO 96/23810; Heim et al., Current Biology 2:178-182 (1996): Heim et al., Proc. Natl. Acad. Sci. USA (1995); or Heim et al., Science 373:663-664 (1995); WO 96/30540, the contents of each of which are incorporated herein by reference in their entireties).

[0418] The AAV vector genomes encoding at least one VENOM element described herein may be useful in the fields of human disease, veterinary applications and a variety of in vivo and in vitro settings. The AAV particles and/or VAPs of the present disclosure may be useful in the field of medicine for the treatment, prophylaxis, palliation or amelioration of diseases and/or disorders. The AAV particles and/or VAPs of the present disclosure may be useful in the field of medicine for the treatment, prophylaxis, palliation or amelioration of neurological diseases and/or disorders.

[0419] Various embodiments herein provide a pharmaceutical composition comprising the AAV particles and/or VAPs described herein and a pharmaceutically acceptable excipient.

[0420] Various embodiments herein provide a method of treating a subject in need thereof comprising administering to the subject a therapeutically effective amount of the pharmaceutical composition described herein.

[0421] Certain embodiments of the method provide that the subject is treated by a route of administration of the pharmaceutical composition selected from the group consisting of: intravenous, intracerebroventricular, intraparenchymal, intrathecal, subpial and intramuscular, or a combination thereof. Certain embodiments of the method provide that the subject is treated for a tauopathy and/or other neurological disorder. In one aspect of the method, a pathological feature of the tauopathy or other neurological disorder is alleviated and/or the progression of the tauopathy or other neurological disorder is halted, slowed, ameliorated or reversed.

[0422] Various embodiments herein describe a method of decreasing the level of soluble tau in the central nervous system of a subject in need thereof comprising administering to said subject an effective amount of the pharmaceutical composition described herein.

[0423] Also described herein are compositions, methods, processes, kits and devices for the design, preparation, manufacture and/or formulation of AAV particles and/or VAPs. In some embodiments, payloads, such as but not limited to anti-tau antibodies, may be encoded by payload constructs or contained within plasmids or vectors or recombinant adeno-associated viruses (AAVs).

[0424] The present disclosure also provides administration and/or delivery methods for vectors and viral particles, e.g., AAV particles and/or VAPs, for the treatment or amelioration of neurological disease, such as, but not limited to tauopathy.

### II. Formulation and Delivery

### Pharmaceutical Compositions

[0425] According to the present disclosure the AAV particles and/or VAPs may be prepared as pharmaceutical compositions. It will be understood that such compositions necessarily comprise one or more active ingredients and, most often, a pharmaceutically acceptable excipient.

[0426] Relative amounts of the active ingredient (e.g. AAV particle and/or VAP), a pharmaceutically acceptable excipient, and/or any additional ingredients in a pharmaceutical composition in accordance with the present disclosure may vary, depending upon the identity, size, and/or condition of the subject being treated and further depending upon the route by which the composition is to be administered. For example, the composition may comprise between 0.1% and 99% (w/w) of the active ingredient. By way of example, the composition may comprise between 0.1% and 100%, e.g., between 0.5 and 50%, between 1-30%, between 5-80%, at least 80% (w/w) active ingredient.

[0427] In some embodiments, the AAV particle and/or VAP pharmaceutical compositions described herein may comprise at least one payload. As a non-limiting example, the pharmaceutical compositions may contain an AAV particle and/or VAP with 1, 2, 3, 4 or 5 payloads. In some embodiments, the pharmaceutical composition may contain a nucleic acid encoding a payload construct comprising at least one VENOM elements.

[0428] Although the descriptions of pharmaceutical compositions provided herein are principally directed to pharmaceutical compositions which are suitable for administration to humans, it will be understood by the skilled artisan that such compositions are generally suitable for administration to any other animal, e.g., to non-human animals, e.g. non-human mammals. Modification of pharmaceutical compositions suitable for administration to humans in order to render the compositions suitable for administration to various animals is well understood, and the ordinarily skilled veterinary pharmacologist can design and/or perform such modification with merely ordinary, if any, experimentation. Subjects to which administration of the pharmaceutical compositions is contemplated include, but are not limited to, humans and/or other primates; mammals, including commercially relevant mammals such as cattle, pigs, horses, sheep, cats, dogs, mice, rats, birds, including commercially relevant birds such as poultry, chickens, ducks, geese, and/or turkeys.

[0429] In some embodiments, compositions are administered to humans, human patients, or subjects.

### Formulations

[0430] The AAV particles and/or VAPs can be formulated using one or more excipients to: (1) increase stability, (2) increase cell transfection or transduction; (3) permit the sustained or delayed expression of the payload; (4) alter the biodistribution (e.g., target the viral particle to specific tissues or cell types); (5) increase the translation of encoded protein; (6) alter the release profile of encoded protein; and/or (7) allow for regulatable expression of the payload.

[0431] Formulations of the present disclosure can include, without limitation, saline, liposomes, lipid nanoparticles, polymers, peptides, proteins, cells transfected with viral vectors (e.g., for transfer or transplantation into a subject) and combinations thereof.

[0432] Formulations of the pharmaceutical compositions described herein may be prepared by any method known or hereafter developed in the art of pharmacology. As used herein the term “pharmaceutical composition” refers to compositions comprising at least one active ingredient and optionally one or more pharmaceutically acceptable excipients.

[0433] In general, such preparatory methods include the step of associating the active ingredient with an excipient and/or one or more other accessory ingredients. As used herein, the phrase “active ingredient” generally refers either to an AAV particle and/or VAP carrying a payload region encoding the polypeptides encoded by a vector genome of by an AAV particle and/or VAP as described herein.

[0434] A pharmaceutical composition in accordance with the present disclosure may be prepared, packaged, and/or sold in bulk, as a single unit dose, and/or as a plurality of single unit doses. As used herein, a “unit dose” refers to a discrete amount of the pharmaceutical composition comprising a predetermined amount of the active ingredient. The amount of the active ingredient is generally equal to the dosage of the active ingredient which would be administered to a subject and/or a convenient fraction of such a dosage such as, for example, one-half or one-third of such a dosage.

[0435] In some embodiments, the AAV particles and/or VAPs may be formulated in phosphate buffered saline (PBS), in combination with an ethylene oxide/propylene oxide copolymer (also known as Pluronic or poloxamer).

[0436] In some embodiments, the AAV particles and/or VAPs may be formulated in PBS with 0.001% Pluronic acid (F-68) (poloxamer 188) at a pH of about 7.0.

[0437] In some embodiments, the AAV particles and/or VAPs may be formulated in PBS with 0.001% Pluronic acid (F-68) (poloxamer 188) at a pH of about 7.3.

[0438] In some embodiments, the AAV particles and/or VAPs may be formulated in PBS with 0.001% Pluronic acid (F-68) (poloxamer 188) at a pH of about 7.4.

[0439] In some embodiments, the AAV particles and/or VAPs may be formulated in a solution comprising sodium chloride, sodium phosphate and an ethylene oxide/propylene oxide copolymer.

[0440] In some embodiments, the AAV particles and/or VAPs may be formulated in a solution comprising sodium chloride, sodium phosphate dibasic, sodium phosphate monobasic and poloxamer 188/Pluronic acid (F-68).

[0441] In some embodiments, the AAV particles and/or VAPs may be formulated in a solution comprising about 180 mM sodium chloride, about 10 mM sodium phosphate and about 0.001% poloxamer 188. In some embodiments, this formulation may be at a pH of about 7.3. The concentration of sodium chloride in the final solution may be 150 mM-200 mM. As non-limiting examples, the concentration of sodium chloride in the final solution may be 150 mM, 160 mM, 170 mM, 180 mM, 190 mM or 200 mM. The concentration of sodium phosphate in the final solution may be 1 mM-50 mM. As non-limiting examples, the concentration of sodium phosphate in the final solution may be 1 mM, 2 mM, 3 mM, 4 mM, 5 mM, 6 mM, 7 mM, 8 mM, 9 mM, 10 mM, 15 mM, 20 mM, 25 mM, 30 mM, 40 mM, or 50 mM. The concentration of poloxamer 188 (Pluronic acid (F-68)) may be 0.0001%-1%. As non-limiting examples, the concentration of poloxamer 188 (Pluronic acid (F-68)) may be 0.0001%, 0.0005%, 0.001%, 0.005%, 0.01%, 0.05%, 0.1%, 0.5%, or 1%. The final solution may have a pH of 6.8-7.7. Non-limiting examples for the pH of the final solution include a pH of 6.8, 6.9, 7.0, 7.1, 7.2, 7.3, 7.4, 7.5, 7.6, or 7.7.

[0442] In some embodiments, the AAV particles and/or VAPs of the disclosure may be formulated in a solution comprising about 1.05% sodium chloride, about 0.212% sodium phosphate dibasic, heptahydrate, about 0.025% sodium phosphate monobasic, monohydrate, and 0.001% poloxamer 188, at a pH of about 7.4. As a non-limiting example, the concentration of AAV particle and/or VAP in this formulated solution may be about 0.001%. The concentration of sodium chloride in the final solution may be 0.1-2.0%, with non-limiting examples of 0.1%, 0.25%, 0.5%, 0.75%, 0.95%, 0.96%, 0.97%, 0.98%, 0.99%, 1.00%, 1.01%, 1.02%, 1.03%, 1.04%, 1.05%, 1.06%, 1.07%, 1.08%, 1.09%, 1.10%, 1.25%, 1.5%, 1.75%, or 2%. The concentration of sodium phosphate dibasic in the final solution may be 0.100-0.300% with non-limiting examples including 0.100%, 0.125%, 0.150%, 0.175%, 0.200%, 0.210%, 0.211%, 0.212%, 0.213%, 0.214%, 0.215%, 0.225%, 0.250%, 0.275%, 0.300%. The concentration of sodium phosphate monobasic in the final solution may be 0.010-0.050%, with non-limiting examples of 0.010%, 0.015%, 0.020%, 0.021%, 0.022%, 0.023%, 0.024%, 0.025%, 0.026%, 0.027%, 0.028%, 0.029%, 0.030%, 0.035%, 0.040%, 0.045%, or 0.050%. The concentration of poloxamer 188 (Pluronic acid (F-68)) may be 0.0001-1%. As non-limiting examples, the concentration of poloxamer 188 (Pluronic acid (F-68)) may be 0.0001%, 0.0005%, 0.001%, 0.005%, 0.01%, 0.05%, 0.1%, 0.5%, or 1%. The final solution may have a pH of 6.8-7.7. Non-limiting examples for the pH of the final solution include a pH of 6.8, 6.9, 7.0, 7.1, 7.2, 7.3, 7.4, 7.5, 7.6, or 7.7.

[0443] Relative amounts of the active ingredient (e.g. AAV particle and/or VAP), the pharmaceutically acceptable excipient, and/or any additional ingredients in a pharmaceutical composition in accordance with the present disclosure may vary, depending upon the identity, size, and/or condition of the subject being treated and further depending upon the route by which the composition is to be administered. For example, the composition may comprise between 0.1% and 99% (w/w) of the active ingredient. By way of example, the composition may comprise between 0.1% and 100%, e.g., between 0.5 and 50%, between 1-30%, between 5-80%, or at least 80% (w/w) active ingredient.

[0444] In some embodiments, the AAV formulations described herein may contain sufficient AAV particles and/or VAPs for expression of at least one VENOM element. As a non-limiting example, the AAV particles and/or VAPs may contain vector genomes encoding 1, 2, 3, 4, or 5 functional antibodies.

[0445] According to the present disclosure AAV particles and/or VAPs may be formulated for CNS delivery. Agents that cross the brain blood barrier may be used. For example, some cell penetrating peptides that can target molecules to the brain blood barrier endothelium may be used for formulation (e.g., Mathupala, Expert Opin Ther Pat., 2009, 19, 137-140; the content of which is incorporated herein by reference in its entirety).

### Excipients and Diluents

[0446] In some embodiments, a pharmaceutically acceptable excipient may be at least 95%, at least 96%, at least 97%, at least 98%, at least 99%, or 100% pure. In some embodiments, an excipient is approved for use for humans and for veterinary use. In some embodiments, an excipient may be approved by United States Food and Drug Administration. In some embodiments, an excipient may be of pharmaceutical grade. In some embodiments, an excipient may meet the standards of the United States Pharmacopoeia (USP), the European Pharmacopoeia (EP), the British Pharmacopoeia, and/or the International Pharmacopoeia.

[0447] Excipients, as used herein, include, but are not limited to, any and all solvents, dispersion media, diluents, or other liquid vehicles, dispersion or suspension aids, surface active agents, isotonic agents, thickening or emulsifying agents, preservatives, and the like, as suited to the particular dosage form desired. Various excipients for formulating pharmaceutical compositions and techniques for preparing the composition are known in the art (see Remington: The Science and Practice of Pharmacy, 21st Edition, A. R. Gennaro, Lippincott, Williams & Wilkins, Baltimore, Md., 2006; incorporated herein by reference in its entirety). The use of a conventional excipient medium may be contemplated within the scope of the present disclosure, except insofar as any conventional excipient medium may be incompatible with a substance or its derivatives, such as by producing any undesirable biological effect or otherwise interacting in a deleterious manner with any other component(s) of the pharmaceutical composition.

[0448] Exemplary diluents include, but are not limited to, calcium carbonate, sodium carbonate, calcium phosphate, dicalcium phosphate, calcium sulfate, calcium hydrogen phosphate, sodium phosphate lactose, sucrose, cellulose, microcrystalline cellulose, kaolin, mannitol, sorbitol, inositol, sodium chloride, dry starch, cornstarch, powdered sugar, etc., and/or combinations thereof.

### Inactive Ingredients

[0449] In some embodiments, AAV particle and/or VAP formulations may comprise at least one inactive ingredient. As used herein, the term “inactive ingredient” refers to one or more agents that do not contribute to the activity of the active ingredient of the pharmaceutical composition included in formulations. In some embodiments, all, none or some of the inactive ingredients which may be used in the formulations of the present disclosure may be approved by the US Food and Drug Administration (FDA).

[0450] Pharmaceutical composition formulations of AAV particles and/or VAPs disclosed herein may include cations or anions. In some embodiments, the formulations include metal cations such as, but not limited to, Zn2+, Ca2+, Cu2+, Mn2+, Mg+ and combinations thereof. As a non-limiting example, formulations may include polymers and complexes with a metal cation (See e.g., U.S. Pat. Nos. 6,265,389 and 6,555,525, each of which is herein incorporated by reference in its entirety).

### III. Administration and Dosing

### Administration

[0451] The AAV particles and/or VAPs of the present disclosure may be administered by any delivery route which results in a therapeutically effective outcome. These include, but are not limited to, enteral (into the intestine), gastroenteral, epidural (into the dura mater), oral (by way of the mouth), transdermal, intracerebral (into the cerebrum), intracerebroventricular (into the cerebral ventricles), epicutaneous (application onto the skin), intradermal (into the skin itself), subcutaneous (under the skin), nasal administration (through the nose), intravenous (into a vein), intravenous bolus, intravenous drip, intra-arterial (into an artery), intramuscular (into a muscle), intracardiac (into the heart), intraosseous infusion (into the bone marrow), intrathecal (into the spinal canal), intraparenchymal (into the substance of, e.g., into brain tissue), intraperitoneal (infusion or injection into the peritoneum), intravesical infusion, intravitreal (through the eye), intracavernous injection (into a pathologic cavity) intracavitary (into the base of the penis), intravaginal administration, intrauterine, extra-amniotic administration, transdermal (diffusion through the intact skin for systemic distribution), transmucosal (diffusion through a mucous membrane), transvaginal, insufflation (snorting), sublingual, sublabial, enema, eye drops (onto the conjunctiva), ear drops, auricular (in or by way of the ear), buccal (directed toward the cheek), conjunctival, cutaneous, dental (to a tooth or teeth), electro-osmosis, endocervical, endosinusial, endotracheal, extracorporeal, hemodialysis, infiltration, interstitial, intra-abdominal, intra-amniotic, intra-articular, intrabiliary, intrabronchial, intrabursal, intracartilaginous (within a cartilage), intracaudal (within the cauda equine), intracisternal (within the cisterna magna cerebellomedularis), intracorneal (within the cornea), dental intracoronal, intracoronary (within the coronary arteries), intracorporus cavernosum (within the dilatable spaces of the corporus cavernosa of the penis), intradiscal (within a disc), intraductal (within a duct of a gland), intraduodenal (within the duodenum), intradural (within or beneath the dura), intraepidermal (to the epidermis), intraesophageal (to the esophagus), intragastric (within the stomach), intragingival (within the gingivae), intraileal (within the distal portion of the small intestine), intralesional (within or introduced directly to a localized lesion), intraluminal (within a lumen of a tube), intralymphatic (within the lymph), intramedullary (within the marrow cavity of a bone), intrameningeal (within the meninges), intramyocardial (within the myocardium), intraocular (within the eye), intraovarian (within the ovary), intrapericardial (within the pericardium), intrapleural (within the pleura), intraprostatic (within the prostate gland), intrapulmonary (within the lungs or its bronchi), intrasinal (within the nasal or periorbital sinuses), intraspinal (within the vertebral column), intrasynovial (within the synovial cavity of a joint), intratendinous (within a tendon), intratesticular (within the testicle), intrathecal (within the cerebrospinal fluid at any level of the cerebrospinal axis), intrathoracic (within the thorax), intratubular (within the tubules of an organ), intratumor (within a tumor), intratympanic (within the aurus media), intravascular (within a vessel or vessels), intraventricular (within a ventricle), iontophoresis (by means of electric current where ions of soluble salts migrate into the tissues of the body), irrigation (to bathe or flush open wounds or body cavities), laryngeal (directly upon the larynx), nasogastric (through the nose and into the stomach), occlusive dressing technique (topical route administration which is then covered by a dressing which occludes the area), ophthalmic (to the external eye), oropharyngeal (directly to the mouth and pharynx), parenteral, percutaneous, periarticular, peridural, perineural, periodontal, rectal, respiratory (within the respiratory tract by inhaling orally or nasally for local or systemic effect), retrobulbar (behind the pons or behind the eyeball), soft tissue, subarachnoid, subconjunctival, submucosal, topical, transplacental (through or across the placenta), transtracheal (through the wall of the trachea), transtympanic (across or through the tympanic cavity), ureteral (to the ureter), urethral (to the urethra), vaginal, caudal block, diagnostic, nerve block, biliary perfusion, cardiac perfusion, photopheresis, and spinal.

[0452] In some embodiments, compositions may be administered in a way which allows them to cross the blood-brain barrier, vascular barrier, or other epithelial barrier. The AAV particles and/or VAPs of the present disclosure may be administered in any suitable form, either as a liquid solution or suspension, as a solid form suitable for liquid solution or suspension in a liquid solution. The AAV particles and/or VAPs may be formulated with any appropriate and pharmaceutically acceptable excipient.

[0453] In some embodiments, the AAV particles and/or VAPs of the present disclosure may be delivered to a subject via a single route administration.

[0454] In some embodiments, the AAV particles and/or VAPs of the present disclosure may be delivered to a subject via a multi-site route of administration. A subject may be administered at 2, 3, 4, 5, or more than 5 sites.

[0455] In some embodiments, a subject may be administered the AAV particles and/or VAPs of the present disclosure using a bolus infusion.

[0456] In some embodiments, a subject may be administered the AAV particles and/or VAPs of the present disclosure using sustained delivery over a period of minutes, hours, or days. The infusion rate may be changed depending on the subject, distribution, formulation or another delivery parameter.

[0457] In some embodiments, the AAV particles and/or VAPs may be delivered by more than one route of administration. As non-limiting examples of combination administrations, AAV particles and/or VAPs may be delivered by intrathecal and intracerebroventricular, or by intravenous and intraparenchymal administration.

### Intravenous Administration

[0458] In some embodiments, the AAV particles and/or VAPs may be administered to a subject by systemic administration.

[0459] In some embodiments, the systemic administration is intravenous administration.

[0460] In another embodiment, the systemic administration is intraarterial administration.

[0461] In some embodiments, the AAV particles and/or VAPs of the present disclosure may be administered to a subject by intravenous administration.

[0462] In some embodiments, the intravenous administration may be achieved by subcutaneous delivery.

[0463] In some embodiments, the intravenous administration may be achieved by a tail vein injection (e.g., in a mouse model).

[0464] In some embodiments, the intravenous administration may be achieved by retro-orbital injection.

### Administration to the CNS

[0465] In some embodiments, the AAV particles and/or VAPs may be delivered by direct injection into the brain. As a non-limiting example, the brain delivery may be by intrahippocampal administration.

[0466] In some embodiments, the AAV particles and/or VAPs of the present disclosure may be administered to a subject by intraparenchymal administration. In some embodiments, the intraparenchymal administration is to tissue of the central nervous system.

[0467] In some embodiments, the AAV particles and/or VAPs of the present disclosure may be administered to a subject by intracranial delivery (See, e.g., U.S. Pat. No. 8,119,611; the content of which is incorporated herein by reference in its entirety).

[0468] In some embodiments, the AAV particles and/or VAPs may be delivered by injection into the CSF pathway. Non-limiting examples of delivery to the CSF pathway include intrathecal and intracerbroventricular administration.

[0469] In some embodiments, the AAV particles and/or VAPs may be delivered to the brain by systemic delivery. As a non-limiting example, the systemic delivery may be by intravascular administration. As a non-limiting example, the systemic or intravascular administration may be intravenous.

[0470] In some embodiments, the AAV particles and/or VAPs of the present disclosure may be delivered by intraocular delivery route. A non-limiting example of intraocular administration include an intravitreal injection.

### Intramuscular Administration

[0471] In some embodiments, the AAV particles and/or VAPs may be delivered by intramuscular administration. Whilst not wishing to be bound by theory, the multi-nucleated nature of muscle cells provides an advantage to gene transduction subsequent to AAV delivery. Cells of the muscle are capable of expressing recombinant proteins with the appropriate post-translational modifications. The enrichment of muscle tissue with vascular structures allows for transfer to the blood stream and whole-body delivery. Examples of intramuscular administration include systemic (e.g., intravenous), subcutaneous or directly into the muscle. In some embodiments, more than one injection is administered.

[0472] In some embodiments, the AAV particles and/or VAPs of the present disclosure may be delivered by intramuscular delivery route. (See, e.g., U.S. Pat. No. 6,506,379; the content of which is incorporated herein by reference in its entirety). Non-limiting examples of intramuscular administration include an intravenous injection or a subcutaneous injection.

[0473] In some embodiments, the AAV particles and/or VAPs of the present disclosure are administered to a subject and transduce muscle of a subject. As a non-limiting example, the AAV particles and/or VAPs are administered by intramuscular administration.

[0474] In some embodiments, the AAV particles and/or VAPs of the present disclosure may be administered to a subject by subcutaneous administration.

[0475] In some embodiments, the intramuscular administration is via systemic delivery.

[0476] In some embodiments, the intramuscular administration is via intravenous delivery.

[0477] In some embodiments, the intramuscular administration is via direct injection to the muscle.

[0478] In some embodiments, the muscle is transduced by administration, and this is referred to as intramuscular administration.

[0479] In some embodiments, the intramuscular delivery comprises administration at one site.

[0480] In some embodiments, the intramuscular delivery comprises administration at more than one site. In some embodiments, the intramuscular delivery comprises administration at two sites. In some embodiments, the intramuscular delivery comprises administration at three sites. In some embodiments, the intramuscular delivery comprises administration at four sites. In some embodiments, the intramuscular delivery comprises administration at more than four sites.

[0481] In some embodiments, intramuscular delivery is combined with at least one other method of administration.

[0482] In some embodiments, the AAV particles and/or VAPs that may be administered to a subject by peripheral injections. Non-limiting examples of peripheral injections include intraperitoneal, intramuscular, intravenous, conjunctival, or joint injection. It was disclosed in the art that the peripheral administration of AAV vector genomes can be transported to the central nervous system, for example, to the motor neurons (e.g., U.S. Patent Publication Nos. US20100240739 and US20100130594; the content of each of which is incorporated herein by reference in their entirety).

[0483] In some embodiments, the AAV particles and/or VAPs of the present disclosure may be administered to a subject by intraparenchymal administration. In some embodiments, the intraparenchymal administration is to muscle tissue.

[0484] In some embodiments, the AAV particles and/or VAPs of the present disclosure are delivered as described in Bright et al 2015 (Neurobiol Aging. 36(2):693-709), the contents of which are herein incorporated by reference in their entirety.

[0485] In some embodiments, the AAV particles and/or VAPs of the present disclosure are administered to the gastrocnemius muscle of a subject.

[0486] In some embodiments, the AAV particles and/or VAPs of the present disclosure are administered to the bicep femorii of the subject.

[0487] In some embodiments, the AAV particles and/or VAPs of the present disclosure are administered to the tibialis anterior muscles.

[0488] In some embodiments, the AAV particles and/or VAPs of the present disclosure are administered to the soleus muscle.

### Depot Administration

[0489] As described herein, in some embodiments, pharmaceutical compositions, AAV particles and/or VAPs of the present disclosure are formulated in depots for extended release. Generally, specific organs or tissues (“target tissues”) are targeted for administration.

[0490] In some aspects, pharmaceutical compositions, AAV particles and/or VAPs of the present disclosure are spatially retained within or proximal to target tissues. Provided are methods of providing pharmaceutical compositions, AAV particles and/or VAPs, to target tissues of mammalian subjects by contacting target tissues (which comprise one or more target cells) with pharmaceutical compositions, AAV particles and/or VAPs, under conditions such that they are substantially retained in target tissues, meaning that at least 10, 20, 30, 40, 50, 60, 70, 80, 85, 90, 95, 96, 97, 98, 99, 99.9, 99.99 or greater than 99.991% of the composition is retained in the target tissues. Advantageously, retention is determined by measuring the amount of pharmaceutical compositions, AAV particles and/or VAPs, that enter one or more target cells. For example, at least 1%, 5%, 10%, 20%, 30%, 40%, 50%, 60%, 70%, 80%, 85%, 90%, 95%, 96%, 97%, 98%, 99%, 99.9%, 99.99%, or greater than 99.99% of pharmaceutical compositions, AAV particles and/or VAPs, administered to subjects are present intracellularly at a period of time following administration. For example, intramuscular injection to mammalian subjects may be performed using aqueous compositions comprising pharmaceutical compositions. AAV particles and/or VAPs of the present disclosure and one or more transfection reagents, and retention is determined by measuring the amount of pharmaceutical compositions, AAV particles and/or VAPs, present in muscle cells.

[0491] Certain aspects are directed to methods of providing pharmaceutical compositions, AAV particles and/or VAPs of the present disclosure to a target tissues of mammalian subjects, by contacting target tissues (comprising one or more target cells) with pharmaceutical compositions, AAV particles and/or VAPs under conditions such that they are substantially retained in such target tissues. Pharmaceutical compositions, AAV particles and/or VAPs comprise enough active ingredient such that the effect of interest is produced in at least one target cell. In some embodiments, pharmaceutical compositions, AAV particles and/or VAPs generally comprise one or more cell penetration agents, although “naked” formulations (such as without cell penetration agents or other agents) are also contemplated, with or without pharmaceutically acceptable carriers.

### Delivery

[0492] In some embodiments, the AAV particles and/or VAPs or pharmaceutical compositions of the present disclosure may be administered or delivered using the methods for treatment of disease described in U.S. Pat. No. 8,999,948, or International Publication No. WO2014178863, the contents of which are herein incorporated by reference in their entirety.

[0493] In some embodiments, the AAV particles and/or VAPs or pharmaceutical compositions of the present disclosure may be administered or delivered using the methods for delivering gene therapy in Alzheimer's Disease or other neurodegenerative conditions as described in US Application No. 20150126590, the contents of which are herein incorporated by reference in their entirety.

[0494] In some embodiments, the AAV particles and/or VAPs or pharmaceutical compositions of the present disclosure may be administered or delivered using the methods for delivery of a CNS gene therapy as described in U.S. Pat. Nos. 6,436,708, and 8,946,152, and International Publication No. WO2015168666, the contents of which are herein incorporated by reference in their entirety.

[0495] In some embodiments, the AAV particles and/or VAPs or pharmaceutical compositions of the present disclosure may be administered or delivered using the methods for delivering proteins using AAV vector genomes described in European Patent Application No. EP2678433, the contents of which are herein incorporated by reference in their entirety.

[0496] In some embodiments, the AAV particles and/or VAPs or pharmaceutical compositions of the present disclosure may be administered or delivered using the methods for delivering DNA to the bloodstream described in U.S. Pat. No. 6,211,163, the contents of which are herein incorporated by reference in their entirety.

[0497] In some embodiments, the AAV particles and/or VAPs or pharmaceutical compositions of the present disclosure may be administered or delivered using the methods for delivering a payload to the central nervous system described in U.S. Pat. No. 7,588,757, the contents of which are herein incorporated by reference in their entirety.

[0498] In some embodiments, the AAV particles and/or VAPs or pharmaceutical compositions of the present disclosure may be administered or delivered using the methods for delivering a payload described in U.S. Pat. No. 8,283,151, the contents of which are herein incorporated by reference in their entirety.

[0499] In some embodiments, the AAV particles and/or VAPs or pharmaceutical compositions of the present disclosure may be administered or delivered using the methods for delivering a payload using a glutamic acid decarboxylase (GAD) delivery vector described in International Patent Publication No. WO2001089583, the contents of which are herein incorporated by reference in their entirety.

[0500] In some embodiments, the AAV particles and/or VAPs or pharmaceutical compositions of the present disclosure may be administered or delivered using the methods for delivering a payload to neural cells described in International Patent Publication No. WO2012057363, the contents of which are herein incorporated by reference in their entirety.

### Delivery to Cells

[0501] The present disclosure provides a method of delivering to a cell or tissue any of the above-described AAV particles and/or VAPs, comprising contacting the cell or tissue with said AAV particle and/or VAP or contacting the cell or tissue with a formulation comprising said AAV particle and/or VAP, or contacting the cell or tissue with any of the described compositions, including pharmaceutical compositions. The method of delivering the AAV particle and/or VAP to a cell or tissue can be accomplished in vitro, ex vivo, or in vivo.

### Delivery to Subjects

[0502] The present disclosure additionally provides a method of delivering to a subject, including a mammalian subject, any of the above-described AAV particles and/or VAPs comprising administering to the subject said AAV particle and/or VAP, or administering to the subject a formulation comprising said AAV particle and/or VAP, or administering to the subject any of the described compositions, including pharmaceutical compositions.

### Dose and Regimen

[0503] The present disclosure provides methods of administering AAV particles and/or VAPs in accordance with the disclosure to a subject in need thereof. The pharmaceutical, diagnostic, or prophylactic AAV particles and/or VAPs and compositions of the present disclosure may be administered to a subject using any amount and any route of administration effective for preventing, treating, managing, or diagnosing diseases, disorders and/or conditions. The exact amount required will vary from subject to subject, depending on the species, age, and general condition of the subject, the severity of the disease, the particular composition, its mode of administration, its mode of activity, and the like. The subject may be a human, a mammal, or an animal. Compositions in accordance with the disclosure are typically formulated in unit dosage form for ease of administration and uniformity of dosage. It will be understood, however, that the total daily usage of the compositions of the present disclosure may be decided by the attending physician within the scope of sound medical judgment. The specific therapeutically effective, prophylactically effective, or appropriate diagnostic dose level for any particular individual will depend upon a variety of factors including the disorder being treated and the severity of the disorder; the activity of the specific payload employed; the specific composition employed; the age, body weight, general health, sex and diet of the patient; the time of administration, route of administration, and rate of excretion of the specific AAV particle and/or VAP employed; the duration of the treatment; drugs used in combination or coincidental with the specific AAV particle and/or VAP employed; and like factors well known in the medical arts.

[0504] In certain embodiments, AAV particle and/or VAP pharmaceutical compositions in accordance with the present disclosure may be administered at dosage levels sufficient to deliver from about 0.0001 mg/kg to about 100 mg/kg, from about 0.001 mg/kg to about 0.05 mg/kg, from about 0.005 mg/kg to about 0.05 mg/kg, from about 0.001 mg/kg to about 0.005 mg/kg, from about 0.05 mg/kg to about 0.5 mg/kg, from about 0.01 mg/kg to about 50 mg/kg, from about 0.1 mg/kg to about 40 mg/kg, from about 0.5 mg/kg to about 30 mg/kg, from about 0.01 mg/kg to about 10 mg/kg, from about 0.1 mg/kg to about 10 mg/kg, or from about 1 mg/kg to about 25 mg/kg, of subject body weight per day, one or more times a day, to obtain the desired therapeutic, diagnostic, or prophylactic, effect. It will be understood that the above dosing concentrations may be converted to vg or vector genomes per kg or into total vector genomes administered by one of skill in the art.

[0505] In certain embodiments, AAV particle and/or VAP pharmaceutical compositions in accordance with the present disclosure may be administered at about 10 to about 600 μl/site, 50 to about 500 μl/site, 100 to about 400 μl/site, 120 to about 300 μl/site, 140 to about 200 μl/site, about 160 μl/site. As non-limiting examples, AAV particles and/or VAPs may be administered at 50 μl/site and/or 150 μl/site.

[0506] In certain embodiments, the desired dosage may be delivered using multiple administrations (e.g., two, three, four, or more than four administrations). When multiple administrations are employed, split dosing regimens such as those described herein may be used. As used herein, a “split dose” is the division of “single unit dose” or total daily dose into two or more doses, e.g., two or more administrations of the “single unit dose”. As used herein, a “single unit dose” is a dose of any therapeutic administered in one dose/at one time/single route/single point of contact. i.e., single administration event.

[0507] The desired dosage of the AAV particles and/or VAPs of the present disclosure may be administered as a “pulse dose” or as a “continuous flow”. As used herein, a “pulse dose” is a series of single unit doses of any therapeutic administered with a set frequency over a period of time. As used herein, a “continuous flow” is a dose of therapeutic administered continuously for a period of time in a single route/single point of contact, i.e., continuous administration event. A total daily dose, an amount given or prescribed in 24-hour period, may be administered by any of these methods, or as a combination of these methods, or by any other methods suitable for a pharmaceutical administration.

[0508] In some embodiments, delivery of the AAV particles and/or VAPs of the present disclosure to a subject provides neutralizing activity to a subject. The neutralizing activity can be for at least 1 month, 2 months, 3 months, 4 months, 5 months, 6 months, 7 months, 8 months, 9 months, 10 months, 11 months, 1 year, 13 months, 14 months, 15 months, 16 months, 17 months, 18 months. 19 months, 20 months, 20 months, 21 months, 22 months, 23 months, 2 years, 3 years, 4 years, 5 years, 6 years, 7 years, 8 years, 9 years, 10 years or more than 10 years.

[0509] In some embodiments, delivery of the AAV particles and/or VAPs of the present disclosure results in minimal serious adverse events (SAEs) as a result of the delivery of the AAV particles and/or VAPs.

[0510] In some embodiments, delivery of AAV particles and/or VAPs may comprise a total dose between about 1×10⁶ VG and about 1×10¹⁶ VG. In some embodiments, delivery may comprise a total dose of about 1×10⁶, 2×10⁶, 3×10⁶, 4×10⁶, 5×10⁶, 6×10⁶, 7×10⁶, 8×10⁶, 9×10⁶, 1×10⁷, 2×10⁷, 3×10⁷, 4×10⁷, 5×10⁷, 6×10⁷, 7×10⁷, 8×10⁷, 9×10⁷, 1×10⁸, 2×10⁸, 3×10⁸, 4×10⁸, 5×10⁸, 6×10⁸, 7×10⁸, 8×10⁸, 9×10⁸, 1×10⁹, 2×10⁹, 3×10⁹, 4×10⁹, 5×10⁹, 6×10⁹, 7×10⁹, 8×10⁹, 9×10⁹, 1×10¹⁰, 1.9×10¹⁰, 2×10¹⁰, 3×10¹⁰, 3.73×10¹⁰, 4×10¹⁰, 5×10¹⁰, 6×10¹⁰, 7×10¹⁰, 8×10¹⁰, 9×10¹⁰, 1×10¹¹, 2×10¹¹, 2.5×10¹¹, 3×10¹¹, 4×10¹¹, 5×10¹, 6×10¹, 7×10¹¹, 8×10¹¹, 9×10¹¹, 1×10¹¹, 2×10¹², 3×10¹², 4×10¹², 5×10¹², 6×10¹², 7×10¹², 8×10¹², 9×10¹², 1×10¹³, 2×10¹³, 3×10¹³, 4×10¹³, 5×10¹³, 6×10¹³, 7×10¹³, 8×10¹³, 9×10¹³, 1×10¹⁴, 2×10¹⁴, 3×10¹⁴, 4×10¹⁴, 5×10¹⁴, 6×10¹⁴, 7×10¹⁴, 8×10¹⁴, 9×10¹⁴, 1×10¹⁵, 2×10¹⁵, 3×10¹⁵, 4×10¹⁵, 5×10¹⁵, 6×10¹⁵, 7×10¹⁵, 8×10¹⁵, 9×10¹⁵, or 1×10¹⁶ VG. As a non-limiting example, the total dose is 1×10¹³ VG. As another non-limiting example, the total dose is 2.1×10¹²VG.

[0511] In some embodiments, delivery of AAV particles and/or VAPs may comprise a composition concentration between about 1×10⁶ VG/mL and about 1×10¹⁶ VG/mL. In some embodiments, delivery may comprise a composition concentration of about 1×10⁶, 2×10⁶, 3×10⁶, 4×10⁶, 5×10⁶, 6×10⁶, 7×10⁶, 8×10⁶, 9×10⁶, 1×10⁷, 2×10⁷, 3×10⁷, 4×10⁷, 5×10⁷, 6×10⁷, 7×10⁷, 8×10⁷, 9×10⁷, 1×10⁸, 2×10⁸, 3×10⁸, 4×10⁸, 5×10⁸, 6×10⁸, 7×10⁸, 8×10⁸, 9×10⁸, 1×10⁹, 2×10⁹, 3×10⁹, 4×10⁹, 5×10⁹ 6×10⁹, 7×10⁹, 8×10⁹, 9×10⁹, 1×10¹⁰, 2×10¹⁰, 3×10¹⁰, 4×10¹⁰, 5×10¹⁰, 6×10¹⁰, 7×10¹⁰, 8×10¹⁰, 9×10¹⁰, 1×10¹¹, 2×10¹¹, 3×10¹¹, 4×10¹¹, 5×10¹¹, 6×10¹¹, 7×10¹¹, 8×10¹¹, 9×10¹¹, 1×10¹², 2×10¹², 3×10¹², 4×10¹², 5×10¹², 6×10¹², 7×10¹², 8×10¹², 9×10¹², 1×10¹³, 2×10¹³, 3×10¹³, 4×10¹³, 5×10¹³, 6×10¹³, 7×10¹³, 8×10¹³, 9×10¹³, 1×10¹⁴, 2×10¹⁴, 3×10¹⁴, 4×10¹⁴, 5×10¹⁴, 6×10¹⁴, 7×10¹⁴, 8×10¹⁴ 9×10¹⁴, 1×10¹⁵, 2×10¹⁵, 3×10¹⁵, 4×10¹⁵, 5×10¹⁵, 6×10¹⁵, 7×10¹⁵, 8×10¹⁵, 9×10¹⁵, or 1×10¹⁶ VG/mL. In some embodiments, the delivery comprises a composition concentration of 1×10¹³ VG/mL. In some embodiments, the delivery comprises a composition concentration of 2.1×10¹² VG/mL.

### Combinations

[0512] The AAV particles and/or VAPs may be used in combination with one or more other therapeutic, prophylactic, research or diagnostic agents. By “in combination with,” it is not intended to imply that the agents must be administered at the same time and/or formulated for delivery together, although these methods of delivery are within the scope of the present disclosure. Compositions can be administered concurrently with, prior to, or subsequent to, one or more other desired therapeutics or medical procedures. In general, each agent will be administered at a dose and/or on a time schedule determined for that agent. In some embodiments, the present disclosure encompasses the delivery of pharmaceutical, prophylactic, research, or diagnostic compositions in combination with agents that may improve their bioavailability, reduce and/or modify their metabolism, inhibit their excretion, and/or modify their distribution within the body.

### Measurement of Expression

[0513] Expression of payloads from vector genomes may be determined using various methods known in the art such as, but not limited to immunochemistry (e.g., IHC), in situ hybridization (ISH), enzyme-linked immunosorbent assay (ELISA), affinity ELISA. ELISPOT, flow cytometry, immunocytology, immunohistochemistry, surface plasmon resonance analysis, kinetic exclusion assay, liquid chromatography-mass spectrometry (LCMS), high-performance liquid chromatography (HPLC). BCA assay, immunoelectrophoresis. Western blot, SDS-PAGE, protein immunoprecipitation, and/or PCR.

[0514] In some embodiments, the ELISA assays used are those described in Liu et al 2016, the contents of which are herein incorporated by reference in their entirety (Liu. W et al., 2016 J Neurosci 36(49):12425-12435).

### IV. Methods and Uses of the Compositions

[0515] The present disclosure provides a method for treating a disease, disorder and/or condition in a mammalian subject, including a human subject, comprising administering to the subject any of the AAV particles and/or VAPs described herein or administering to the subject any of the described compositions, including pharmaceutical compositions, described herein.

[0516] In some embodiments, the AAV particles and/or VAPs of the present disclosure are administered to a subject prophylactically.

[0517] In some embodiments, the AAV particles and/or VAPs of the present disclosure are administered to a subject having at least one of the diseases described herein.

[0518] In some embodiments, the AAV particles and/or VAPs of the present disclosure are administered to a subject to treat a disease or disorder described herein. The subject may have the disease or disorder or may be at-risk to developing the disease or disorder.

[0519] In some embodiments, the AAV particles and/or VAPs of the present disclosure are part of an active immunization strategy to protect against diseases and disorders. In an active immunization strategy, a vaccine or AAV particles and/or VAPs are administered to a subject to prevent an infectious disease by activating the subject's production of antibodies that can fight off invading bacteria or viruses.

[0520] In some embodiments, the AAV particles and/or VAPs of the present disclosure are part of a passive immunization strategy. In a passive immunization strategy, antibodies against a particular infectious agent are given directly to the subject.

### Diagnostic Applications

[0521] The AAV particles and/or VAPs of the present disclosure may be used for diagnostic purposes or as diagnostic tools for any disease or disorder. As non-limiting examples, the AAV particles and/or VAPs of the present disclosure or the antibodies encoded within the vector genome therein may be used as a biomarker for disease diagnosis. As a second non-limiting example, the AAV particles and/or VAPs of the present disclosure or the antibodies encoded within the vector genome therein may be used for diagnostic imaging purposes, e.g., MRI, PET, CT or ultrasound.

### Preventative Applications

[0522] The AAV particles and/or VAPs of the present disclosure or the antibodies encoded by the vector genome therein may be used to prevent disease or stabilize the progression of disease. In some embodiments, the AAV particles and/or VAPs of the present disclosure are used to as a prophylactic to prevent a disease or disorder in the future. In some embodiments, the AAV particles and/or VAPs of the present disclosure are used to halt further progression of a disease or disorder. As a non-limiting example, the AAV particles and/or VAPs may be used in a manner similar to that of a vaccine.

### Research Applications

[0523] The AAV particles and/or VAPs of the present disclosure or the antibodies encoded by the vector genome therein may also be used as research tools. The AAV particles and/or VAPs may be used as in any research experiment, e.g., in vivo or in vitro experiments. In a non-limiting example, the AAV particles and/or VAPs may be used in cultured cells. The cultured cells may be derived from any origin known to one with skill in the art, and may be as non-limiting examples, derived from a stable cell line, an animal model or a human patient or control subject. In a non-limiting example, the AAV particles and/or VAPs may be used in in vivo experiments in animal models (i.e., mouse, rat, rabbit, dog, cat, non-human primate, guinea pig, ferret, c-elegans, drosophila, zebrafish, or any other animal used for research purposes, known in the art). In another non-limiting example, the AAV particles and/or VAPs may be used in human research experiments or human clinical trials.

### Combination Applications

[0524] The AAV particles and/or VAPs may be used as a combination therapy with any other therapeutic molecule known in the art. The therapeutic molecule may be approved by the US Food and Drug Administration or may be in clinical trial or at the preclinical research stage. The therapeutic molecule may utilize any therapeutic modality known in the art, with non-limiting examples including gene silencing or interference (i.e., miRNA, siRNA, RNAi, shRNA), gene editing (i.e., TALEN, CRISPR/Cas9 systems, zinc finger nucleases), and gene, protein or enzyme replacement.

### Therapeutic Applications

[0525] The present disclosure additionally provides a method for treating neurological diseases and/or disorders in a mammalian subject, including a human subject, comprising administering to the subject any of the AAV particles and/or VAPs.

[0526] In some embodiments, methods of treating diseases and/or disorders in a subject in need thereof may comprise the steps of: (1) deriving, generating and/or selecting at least one VENOM element or fragment thereof; (2) producing an AAV particle with a vector genome that includes a payload region encoding the VENOM element of (1) (referred to as a VAP); and (3) administering the VAP (or pharmaceutical composition thereof) to the subject.

[0527] The present disclosure provides a method for administering to a subject in need thereof, including a human subject, a therapeutically effective amount of the AAV particles and/or VAPs to slow, stop or reverse disease progression.

### Toxic Repeat Disorders

[0528] In some embodiments, the AAV particles and/or VAPs are used to correct toxic repeats in autosomal dominant disorders such as, but not limited to, Huntington's Disease (HD), Amyotrophic Lateral Sclerosis (ALS) and frontotemporal dementia (FTD). As a non-limiting example, the autosomal dominant disorder is HD and the toxic repeats are in the Huntingtin gene (HTT). As another non-limiting example, the autosomal dominant disorder is ALS and the toxic repeats are in C9orf72. As another non-limiting example, the autosomal dominant disorder is FTD and the toxic repeats are in C9orf72.

[0529] In some embodiments, the AAV particles and/or VAPs correct toxic repeats in autosomal dominant disorders by introducing a stop codon into the gene. The introduction of the stop codon is able to reduce the number of toxic repeats and treats the autosomal dominant disorder.

[0530] In some embodiments, the AAV particles and/or VAPs correct toxic repeats in autosomal dominant disorders by using Cas13 to induce exon-skipping which reduces the number of toxic repeats and treats the autosomal dominant disorder.

### Alzheimer's Disease

[0531] In some embodiments, the AAV particles and/or VAPs are used to introduce protective mutations in a gene in order to treat Alzheimer's Disease (AD). The AD may be familial AD (FAD) (when a familial history of AD is known), early-onset AD (when AD is diagnosed in a subject under the age of 65), or sporadic AD (SAD) (AD in patients without any family history of AD).

[0532] In some embodiments, the protective mutation may be introduced by nucleobase editing. The gene may be, but is not limited to, Amyloid Beta Precursor Protein (APP), Presenilin 1 (PSEN1 or PS1), and Presenilin 2 (PSEN2 or PS2).

[0533] VENOM elements such as, but not limited to CRISPR/Cas9 may be used to introduce mutations into a gene as a protection against Alzheimer's Disease. Paquet et al. (Nature. 2016 May 5; 533(7601):125-9. doi: 10.1038/nature17664; the contents of which are herein incorporated by reference in their entirety) and Tremblay et al. (International Publication No. WO2015168800, the contents of which are herein incorporated by reference in their entirety) describe treating Alzheimer's Disease by introducing the A673T mutation into the APP gene using the CRISPR/Cas9 system.

[0534] In some embodiments, the AAV particles and/or VAPs are used to introduce the A673T protective mutation in the APP gene to treat and/or reduce the symptoms of Alzheimer's Disease.

[0535] In some embodiments, the AAV particles and/or VAPs are used to correct mutations in a gene to treat AD. As a non-limiting example, the gene is APP and the mutation is at amino acid 396 (Glu693Gln), amino acid 717 (Val717IIe, Val717Leu, Val717Phe, or Val717Gly), amino acid 693 (Glu693Gln), amino acid 670, amino acid 671, and/or amino acid 692. As a non-limiting example, the gene is PS1 and the mutation is at amino acid 206 (Gly206Ala), amino acid 146 (Met146Len), amino acid 280 (Glu280Ala), amino acid 163 (His163Arg), amino acid 264 (Pro264Leu), and/or amino acid 318 (Glu318Gly). As a non-limiting example, the gene is PS2.

[0536] In some embodiments, the AAV particles and/or VAPs use the REPAIR method as the VENOM element in order to treat and/or reduce the symptoms of Alzheimer's Disease. As a non-limiting example, the REPAIR method may be used to correct the V717I mutation in the APP gene.

[0537] In some embodiments, to treat Alzheimer's Disease protective mutations may be introduced into a gene and mutations causing a disease, disorder and/or condition may be removed. As a non-limiting example, the A673T protective mutation may be introduced into the APP gene and the V717I mutation may be corrected in the APP gene in order to treat Alzheimer's Disease. The REPAIR method may be used for the introduction of the A673T mutation and the correction of the V717I mutation.

### V. Kits and Devices

### Kits

[0538] In some embodiments, the disclosure provides a variety of kits for conveniently and/or effectively carrying out methods of the present disclosure. Typically, kits will comprise sufficient amounts and/or numbers of components to allow a user to perform multiple treatments of a subject(s) and/or to perform multiple experiments.

[0539] Any of the AAV particles and/or VAPs of the present disclosure may be comprised in a kit. In some embodiments, kits may further include reagents and/or instructions for creating and/or synthesizing compounds and/or compositions of the present disclosure. In some embodiments, kits may also include one or more buffers. In some embodiments, kits may include components for making protein or nucleic acid arrays or libraries and thus, may include, for example, solid supports.

[0540] In some embodiments, kit components may be packaged either in aqueous media or in lyophilized form. The container means of the kits will generally include at least one vial, test tube, flask, bottle, syringe or other container means, into which a component may be placed, and preferably, suitably aliquoted. Where there is more than one kit component, (labeling reagent and label may be packaged together), kits may also generally contain second, third or other additional containers into which additional components may be separately placed. In some embodiments, kits may also comprise second container means for containing sterile, pharmaceutically acceptable buffers and/or other diluents. In some embodiments, various combinations of components may be comprised in one or more vial. Kits of the present disclosure may also typically include means for containing compounds and/or compositions of the present disclosure, e.g., proteins, nucleic acids, and any other reagent containers in close confinement for commercial sale. Such containers may include injection or blow-molded plastic containers into which desired vials are retained.

[0541] In some embodiments, kit components are provided in one and/or more liquid solutions. In some embodiments, liquid solutions are aqueous solutions, with sterile aqueous solutions being particularly preferred. In some embodiments, kit components may be provided as dried powder(s). When reagents and/or components are provided as dry powders, such powders may be reconstituted by the addition of suitable volumes of solvent. In some embodiments, it is envisioned that solvents may also be provided in another container means. In some embodiments, labeling dyes are provided as dried powders. In some embodiments, it is contemplated that 10, 20, 30, 40, 50, 60, 70, 80, 90, 100, 120, 120, 130, 140, 150, 160, 170, 180, 190, 200, 300, 400, 500, 600, 700, 800, 900, 1000 micrograms or at least or at most those amounts of dried dye are provided in kits. In such embodiments, dye may then be resuspended in any suitable solvent, such as DMSO.

[0542] In some embodiments, kits may include instructions for employing kit components as well the use of any other reagent not included in the kit. Instructions may include variations that may be implemented.

### Devices

[0543] In some embodiments, the AAV particles and/or VAPs may delivered to a subject using a device to deliver the AAV particles and/or VAPs and a head fixation assembly. The head fixation assembly may be, but is not limited to, any of the head fixation assemblies sold by MRI interventions. As a non-limiting example, the head fixation assembly may be any of the assemblies described in U.S. Pat. Nos. 8,099,150, 8,548,569, and 9,031,636 and International Patent Publication Nos. WO201108495 and WO2014014585, the contents of each of which are incorporated by reference in their entireties. A head fixation assembly may be used in combination with an MRI compatible drill such as, but not limited to, the MRI compatible drills described in International Patent Publication No. WO2013181008 and US Patent Publication No. US20130325012, the contents of which are herein incorporated by reference in its entirety.

[0544] In some embodiments, the AAV particles and/or VAPs may be delivered using a method, system and/or computer program for positioning apparatus to a target point on a subject to deliver the AAV particles and/or VAPs. As a non-limiting example, the method, system and/or computer program may be the methods, systems and/or computer programs described in U.S. Pat. No. 8,340,743, the contents of which are herein incorporated by reference in its entirety. The method may include: determining a target point in the body and a reference point, wherein the target point and the reference point define a planned trajectory line (PTL) extending through each; determining a visualization plane, wherein the PTL intersects the visualization plane at a sighting point; mounting the guide device relative to the body to move with respect to the PTL, wherein the guide device does not intersect the visualization plane; determining a point of intersection (GPP) between the guide axis and the visualization plane; and aligning the GPP with the sighting point in the visualization plane.

[0545] In some embodiments, the AAV particles and/or VAPs may be delivered to a subject using a convention-enhanced delivery device. Non-limiting examples of targeted delivery of drugs using convection are described in US Patent Publication Nos. US20100217228, US20130035574, and US 20130035660 and International Patent Publication No. WO2013019830 and WO2008144585, the contents of each of which are herein incorporated by reference in their entireties.

[0546] In some embodiments, a subject may be imaged prior to, during and/or after delivery of the AAV particles and/or VAPs. The imaging method may be a method known in the art and/or described herein, such as but not limited to, magnetic resonance imaging (MRI). As a non-limiting example, imaging may be used to assess therapeutic effect. As another non-limiting example, imaging may be used for assisted delivery of AAV particles and/or VAPs.

[0547] In some embodiments, the AAV particles and/or VAPs may be delivered using an MRI-guided device. Non-limiting examples of MRI-guided devices are described in U.S. Pat. Nos. 9,055,884, 9,042,958, 8,886,288, 8,768,433, 8,396,532, 8,369,930, 8,374,677, and 8,175,677 and US Patent Application No. US20140024927 the contents of each of which are herein incorporated by reference in their entireties. As a non-limiting example, the MRI-guided device may be able to provide data in real time such as those described in U.S. Pat. Nos. 8,886,288 and 8,768,433, the contents of each of which is herein incorporated by reference in its entirety. As another non-limiting example, the MRI-guided device or system may be used with a targeting cannula such as the systems described in U.S. Pat. Nos. 8,175,677 and 8,374,677, the contents of each of which are herein incorporated by reference in their entireties. As yet another non-limiting example, the MRI-guided device includes a trajectory guide frame for guiding an interventional device as described, for example, in U.S. Pat. No. 9,055,884 and US Patent Application No. US20140024927, the contents of each of which are herein incorporated by reference in their entireties.

[0548] In some embodiments, the AAV particles and/or VAPs may be delivered using an MRI-compatible tip assembly. Non-limiting examples of MRI-compatible tip assemblies are described in US Patent Publication No. US20140275980, the contents of which is herein incorporated by reference in its entirety.

[0549] In some embodiments, the AAV particles and/or VAPs may be delivered using a cannula which is MRI-compatible. Non-limiting examples of MRI-compatible cannulas include those taught in International Patent Publication No. WO2011130107, the contents of which are herein incorporated by reference in its entirety.

[0550] In some embodiments, the AAV particles and/or VAPs may be delivered using a catheter which is MRI-compatible. Non-limiting examples of MRI-compatible catheters include those taught in International Patent Publication No. WO2012116265, U.S. Pat. No. 8,825,133 and US Patent Publication No. US20140024909, the contents of each of which are herein incorporated by reference in their entireties.

[0551] In some embodiments, the AAV particles and/or VAPs may be delivered using a device with an elongated tubular body and a diaphragm as described in US Patent Publication Nos. US20140276582 and US20140276614, the contents of each of which are herein incorporated by reference in their entireties.

[0552] In some embodiments, the AAV particles and/or VAPs may be delivered using an MRI compatible localization and/or guidance system such as, but not limited to, those described in US Patent Publication Nos. US20150223905 and US20150230871, the contents of each of which are herein incorporated by reference in their entireties. As a non-limiting example, the MRI compatible localization and/or guidance systems may comprise a mount adapted for fixation to a patient, a targeting cannula with a lumen configured to attach to the mount so as to be able to controllably translate in at least three dimensions, and an elongate probe configured to snugly advance via slide and retract in the targeting cannula lumen, the elongate probe comprising at least one of a stimulation or recording electrode.

[0553] In some embodiments, the AAV particles and/or VAPs may be delivered to a subject using a trajectory frame as described in US Patent Publication Nos. US20150031982 and US20140066750 and International Patent Publication Nos. WO2015057807 and WO2014039481, the contents of each of which are herein incorporated by reference in their entireties.

[0554] In some embodiments, the AAV particles and/or VAPs may be delivered to a subject using a gene gun.

### VI. Definitions

[0555] At various places in the present specification, substituents of compounds of the present disclosure are disclosed in groups or in ranges. It is specifically intended that the present disclosure include each and every individual sub combination of the members of such groups and ranges.

[0556] About: As used herein, the term “about” means+/−10% of the recited value.

[0557] Adeno-associated virus: The term “adeno-associated virus” or “AAV” as used herein refers to members of the dependovirus genus comprising any particle, sequence, gene, protein, or component derived therefrom.

[0558] AAV Particle: As used herein, an “AAV particle” is a virus which comprises a vector genome with at least one payload region and at least one ITR region. AAV vector genomes of the present disclosure may be produced recombinantly and may be based on adeno-associated virus (AAV) parent or reference sequences. AAV particle may be derived from any serotype, described herein or known in the art, including combinations of serotypes (i.e., “pseudotyped” AAV) or from various genomes (e.g., single stranded or self-complementary). In addition, the AAV particle may be replication defective and/or targeted.

[0559] Activity: As used herein, the term “activity” refers to the condition in which things are happening or being done. Compositions may have activity and this activity may involve one or more biological events.

[0560] Administered in combination: As used herein, the term “administered in combination” or “combined administration” means that two or more agents are administered to a subject at the same time or within an interval such that there may be an overlap of an effect of each agent on the patient. In some embodiments, they are administered within about 60, 30, 15, 10, 5, or 1 minute of one another. In some embodiments, the administrations of the agents are spaced sufficiently closely together such that a combinatorial (e.g., a synergistic) effect is achieved.

[0561] Amelioration: As used herein, the term “amelioration” or “ameliorating” refers to a lessening of severity of at least one indicator of a condition or disease. For example, in the context of neurodegeneration disorder, amelioration includes the reduction of neuron loss.

[0562] Animal: As used herein, the term “animal” refers to any member of the animal kingdom. In some embodiments, “animal” refers to humans at any stage of development. In some embodiments, “animal” refers to non-human animals at any stage of development. In certain embodiments, the non-human animal is a mammal (e.g., a rodent, a mouse, a rat, a rabbit, a monkey, a dog, a cat, a sheep, cattle, a primate, or a pig). In some embodiments, animals include, but are not limited to, mammals, birds, reptiles, amphibians, fish, and worms. In some embodiments, the animal is a transgenic animal, genetically-engineered animal, or a clone.

[0563] Antibody: As used herein, the term “antibody” is referred to in the broadest sense and specifically covers various embodiments including, but not limited to monoclonal antibodies, polyclonal antibodies, multispecific antibodies (e.g. bispecific antibodies formed from at least two intact antibodies), and antibody fragments (e.g., diabodies) so long as they exhibit a desired biological activity (e.g., “functional”). Antibodies are primarily amino-acid based molecules but may also comprise one or more modifications (including, but not limited to the addition of sugar moieties, fluorescent moieties, chemical tags, etc.). Non-limiting examples of antibodies or fragments thereof include VH and VL domains, scFvs, Fab, Fab′, F(ab′)₂, Fv fragment, diabodies, linear antibodies, single chain antibody molecules, multispecific antibodies, bispecific antibodies, intrabodies, monoclonal antibodies, polyclonal antibodies, humanized antibodies, codon-optimized antibodies, tandem scFv antibodies, bispecific T-cell engagers, mAb2 antibodies, chimeric antigen receptors (CAR), tetravalent bispecific antibodies, biosynthetic antibodies, native antibodies, miniaturized antibodies, unibodies, maxibodies, antibodies to senescent cells, antibodies to conformers, antibodies to disease specific epitopes, or antibodies to innate defense molecules.

[0564] Approximately: As used herein, the term “approximately” or “about,” as applied to one or more values of interest, refers to a value that is similar to a stated reference value. In certain embodiments, the term “approximately” or “about” refers to a range of values that fall within 25%, 20%, 19%, 18%, 17%, 16%, 15%, 14%, 13%, 12%, 11%, 10%, 9%, 8%, 7%, 6%, 5%, 4%, 3%, 2%, 1%, or less in either direction (greater than or less than) of the stated reference value unless otherwise stated or otherwise evident from the context (except where such number would exceed 100% of a possible value).

[0565] Associated with: As used herein, the terms “associated with,” “conjugated,” “linked,” “attached,” and “tethered,” when used with respect to two or more moieties, means that the moieties are physically associated or connected with one another, either directly or via one or more additional moieties that serves as a linking agent, to form a structure that is sufficiently stable so that the moieties remain physically associated under the conditions in which the structure is used, e.g., physiological conditions. An “association” need not be strictly through direct covalent chemical bonding. It may also suggest ionic or hydrogen bonding or a hybridization-based connectivity sufficiently stable such that the “associated” entities remain physically associated.

[0566] Bifunctional: As used herein, the term “bifunctional” refers to any substance, molecule or moiety which is capable of or maintains at least two functions. The functions may affect the same outcome or a different outcome. The structure that produces the function may be the same or different.

[0567] Biocompatible: As used herein, the term “biocompatible” means compatible with living cells, tissues, organs or systems posing little to no risk of injury, toxicity or rejection by the immune system.

[0568] Biodegradable: As used herein, the term “biodegradable” means capable of being broken down into innocuous products by the action of living things.

[0569] Biologically active: As used herein, the phrase “biologically active” refers to a characteristic of any substance that has activity in a biological system and/or organism. For instance, a substance that, when administered to an organism, has a biological effect on that organism, is considered to be biologically active. In particular embodiments, an AAV particle of the present disclosure may be considered biologically active if even a portion of the encoded payload is biologically active or mimics an activity considered biologically relevant.

[0570] Capsid: As used herein, the term “capsid” refers to the protein shell of a virus particle.

[0571] Chimeric antigen receptor (CAR): As used herein, the term “chimeric antigen receptor” or “CAR” refers to an artificial chimeric protein comprising at least one antigen specific targeting region (ASTR), a transmembrane domain and an intracellular signaling domain, wherein the antigen specific targeting region comprises a full-length antibody or a fragment thereof. Any molecule that is capable of binding a target antigen with high affinity can be used in the ASTR of a CAR. The CAR may optionally have an extracellular spacer domain and/or a co-stimulatory domain. A CAR may also be used to generate a cytotoxic cell carrying the CAR.

[0572] Complementary and substantially complementary: As used herein, the term “complementary” refers to the ability of polynucleotides to form base pairs with one another. Base pairs are typically formed by hydrogen bonds between nucleotide units in antiparallel polynucleotide strands. Complementary polynucleotide strands can form base pair in the Watson-Crick manner (e.g., A to T, A to U, C to G), or in any other manner that allows for the formation of duplexes. As persons skilled in the art are aware, when using RNA as opposed to DNA, uracil rather than thymine is the base that is considered to be complementary to adenosine. However, when a U is denoted in the context of the present disclosure, the ability to substitute a T is implied, unless otherwise stated. Perfect complementarity or 100% complementarity refers to the situation in which each nucleotide unit of one polynucleotide strand can form hydrogen bond with a nucleotide unit of a second polynucleotide strand. Less than perfect complementarity refers to the situation in which some, but not all, nucleotide units of two strands can form hydrogen bond with each other. For example, for two 20-mers, if only two base pairs on each strand can form hydrogen bond with each other, the polynucleotide strands exhibit 10% complementarity. In the same example, if 18 base pairs on each strand can form hydrogen bonds with each other, the polynucleotide strands exhibit 90% complementarity. As used herein, the term “substantially complementary” means that the siRNA has a sequence (e.g., in the antisense strand) which is sufficient to bind the desired target mRNA, and to trigger the RNA silencing of the target mRNA.

[0573] Compound: Compounds of the present disclosure include all of the isotopes of the atoms occurring in the intermediate or final compounds. “Isotopes” refers to atoms having the same atomic number but different mass numbers resulting from a different number of neutrons in the nuclei. For example, isotopes of hydrogen include tritium and deuterium.

[0574] The compounds and salts of the present disclosure can be prepared in combination with solvent or water molecules to form solvates and hydrates by routine methods.

[0575] Conditionally active: As used herein, the term “conditionally active” refers to a mutant or variant of a wild-type polypeptide, wherein the mutant or variant is more or less active at physiological conditions than the parent polypeptide. Further, the conditionally active polypeptide may have increased or decreased activity at aberrant conditions as compared to the parent polypeptide. A conditionally active polypeptide may be reversibly or irreversibly inactivated at normal physiological conditions or aberrant conditions.

[0576] Conserved: As used herein, the term “conserved” refers to nucleotides or amino acid residues of a polynucleotide sequence or polypeptide sequence, respectively, that are those that occur unaltered in the same position of two or more sequences being compared. Nucleotides or amino acids that are relatively conserved are those that are conserved amongst more related sequences than nucleotides or amino acids appearing elsewhere in the sequences.

[0577] In some embodiments, two or more sequences are said to be “completely conserved” if they are 100% identical to one another. In some embodiments, two or more sequences are said to be “highly conserved” if they are at least 70% identical, at least 80% identical, at least 90% identical, or at least 95% identical to one another. In some embodiments, two or more sequences are said to be “highly conserved” if they are about 70% identical, about 80% identical, about 90% identical, about 95%, about 98%, or about 99% identical to one another. In some embodiments, two or more sequences are said to be “conserved” if they are at least 30% identical, at least 40% identical, at least 50% identical, at least 60% identical, at least 70% identical, at least 80% identical, at least 90° 1% identical, or at least 95% identical to one another. In some embodiments, two or more sequences are said to be “conserved” if they are about 30% identical, about 40% identical, about 50% identical, about 60% identical, about 70% identical, about 80% identical, about 90% identical, about 95% identical, about 98% identical, or about 99% identical to one another. Conservation of sequence may apply to the entire length of a polynucleotide or polypeptide or may apply to a portion, region or feature thereof.

[0578] Control Elements: As used herein, “control elements”, “regulatory control elements”, or “regulatory sequences” refers to promoter regions, polyadenylation signals, transcription termination sequences, upstream regulatory domains, origins of replication, internal ribosome entry sites (“IRES”), enhancers, and the like, which provide for the replication, transcription and translation of a coding sequence in a recipient cell. Not all of these control elements need always be present as long as the selected coding sequence is capable of being replicated, transcribed and/or translated in an appropriate host cell.

[0579] Controlled Release: As used herein, the term “controlled release” refers to a pharmaceutical composition or compound release profile that conforms to a particular pattern of release to affect a therapeutic outcome.

[0580] CRISPR genome editing element: As used herein, the term “CRISPR genome editing element” refers to any component/element involved in directing the activity of CRISPR-associated (“Cas”) proteins to alter the genome in a cell, including sequences encoding a Cas gene, a tracr (trans-activating CRISPR) sequence (e.g. tracrRNA or an active partial tracrRNA), a tracr-complementary sequence (encompassing a “direct repeat” and a tracrRNA-processed partial direct repeat in the context of an endogenous CRISPR system), a target (guide) sequence (also referred to as a “spacer” in the context of an endogenous CRISPR system), or other sequences and transcripts from a CRISPR locus. In some embodiments, one or more elements of a CRISPR system is derived from a type I, type II, or type III CRISPR-Cas system. In some embodiments, one or more elements of a CRISPR-Cas system is derived from a particular organism which may comprise an endogenous CRISPR-Cas system, such as Streptococcus pyogenes. In general, a CRISPR-Cas system is characterized by components that promote the formation of a CRISPR/Cas complex at the site of a target sequence (also referred to as a protospacer in the context of an endogenous CRISPR-Cas system). In the context of formation of a CRISPR complex, “target sequence” refers to a sequence to which a target recognition sequence is designed to have complementarity, where hybridization between a target sequence and a target recognition sequence promotes the formation of a CRISPR/Cas complex. A target sequence may comprise any polynucleotide, such as DNA or RNA polynucleotides. In some embodiments, a target sequence is located in the nucleus or cytoplasm of a cell.

[0581] Cytostatic: As used herein, “cytostatic” refers to inhibiting, reducing, suppressing the growth, division, or multiplication of a cell (e.g., a mammalian cell (e.g., a human cell)), bacterium, virus, fungus, protozoan, parasite, prion, or a combination thereof.

[0582] Cytotoxic: As used herein, “cytotoxic” refers to killing or causing injurious, toxic, or deadly effect on a cell (e.g., a mammalian cell (e.g., a human cell)), bacterium, virus, fungus, protozoan, parasite, prion, or a combination thereof.

[0583] Delivery: As used herein, “delivery” refers to the act or manner of delivering an AAV particle, a compound, substance, entity, moiety, cargo or payload.

[0584] Delivery Agent: As used herein, “delivery agent” refers to any substance which facilitates, at least in part, the in vivo delivery of an AAV particle to targeted cells.

[0585] Destabilized: As used herein, the term “destable”, “destabilize”, or “destabilizing region” means a region or molecule that is less stable than a starting, wild-type or native form of the same region or molecule.

[0586] Detectable label: As used herein, “detectable label” refers to one or more markers, signals, or moieties which are attached, incorporated or associated with another entity that is readily detected by methods known in the art including radiography, fluorescence, chemiluminescence, enzymatic activity, absorbance and the like. Detectable labels include radioisotopes, fluorophores, chromophores, enzymes, dyes, metal ions, ligands such as biotin, avidin, streptavidin and haptens, quantum dots, and the like. Detectable labels may be located at any position in the peptides or proteins disclosed herein. They may be within the amino acids, the peptides, or proteins, or located at the N- or C-termini.

[0587] Digest: As used herein, the term “digest” means to break apart into smaller pieces or components. When referring to polypeptides or proteins, digestion results in the production of peptides.

[0588] Distal: As used herein, the term “distal” means situated away from the center or away from a point or region of interest.

[0589] Dosing regimen: As used herein, a “dosing regimen” is a schedule of administration or physician determined regimen of treatment, prophylaxis, or palliative care.

[0590] Element: As used herein, the term “element” refers to a distinct portion of an entity. In some embodiments, an element may be a polynucleotide sequence with a specific purpose, incorporated into a longer polynucleotide sequence.

[0591] Encapsulate: As used herein, the term “encapsulate” means to enclose, surround or encase.

[0592] Engineered: As used herein, embodiments are “engineered” when they are designed to have a feature or property, whether structural or chemical, that varies from a starting point, wild type or native molecule.

[0593] Effective Amount: As used herein, the term “effective amount” of an agent is that amount sufficient to effect beneficial or desired results, for example, clinical results, and, as such, an “effective amount” depends upon the context in which it is being applied. For example, in the context of administering an agent that treats cancer, an effective amount of an agent is, for example, an amount sufficient to achieve treatment, as defined herein, of cancer, as compared to the response obtained without administration of the agent.

[0594] Epitope: As used herein, an “epitope” refers to a surface or region on a molecule that is capable of interacting with a biomolecule. For example, a protein may contain one or more amino acids, e.g., an epitope, which interacts with an antibody, e.g., a biomolecule. In some embodiments, when referring to a protein or protein module, an epitope may comprise a linear stretch of amino acids or a three-dimensional structure formed by folded amino acid chains.

[0595] EvoMap™: As used herein, an EvoMap™ refers to a map of a polypeptide, wherein detailed informatics are presented about the effects of single amino acid mutations within the length of the polypeptide and their influence on the properties and characteristics of that polypeptide.

[0596] Expression: As used herein, “expression” of a nucleic acid sequence refers to one or more of the following events: (1) production of an RNA template from a DNA sequence (e.g., by transcription); (2) processing of an RNA transcript (e.g., by splicing, editing, 5′ cap formation, and/or 3′ end processing); (3) translation of an RNA into a polypeptide or protein; and (4) post-translational modification of a polypeptide or protein.

[0597] Feature: As used herein, a “feature” refers to a characteristic, a property, or a distinctive element.

[0598] Formulation: As used herein, a “formulation” includes at least one AAV particle and a delivery agent.

[0599] Fragment: A “fragment,” as used herein, refers to a portion. For example, fragments of proteins may comprise polypeptides obtained by digesting full-length protein isolated from cultured cells.

[0600] Functional: As used herein, a “functional” biological molecule is a biological molecule in a form in which it exhibits a property and/or activity by which it is characterized.

[0601] Fusion protein: As used herein, a “fusion protein” or “chimeric protein” is a protein created through the combination of two or more genes encoding separate proteins. Translation of this fusion gene results in one or more polypeptides with functional properties derived from each of the original proteins. In some embodiments, the fusion protein or chimeric protein can be engineered to include the full sequence of both original proteins. In other embodiments, the fusion protein or chimeric protein includes a part, such as a functional part or domain, from each of the proteins. Various spatial arrangements of the domains may be envisioned according to the present disclosure. It is contemplated as part of the current disclosure that the domains may be N-terminal, C-terminal, or interspersed with respect to each other in various orientations. In some embodiments, the fusion proteins may comprise multiple copies of a particular domain. The various domains of the fusion proteins may be connected to each other by linkers. In some embodiments, the domains may be encoded on separate polynucleotides. In some embodiments, they may be encoded on the same polynucleotide. In some embodiments, the various domains may be on the same polypeptide. In other embodiments, the domains may be on separate polypeptides. It is also understood that the fusion proteins or proteins of the present disclosure may be codon optimized for expression in the system of interest according to methods known in the art.

[0602] Gene expression: The term “gene expression” refers to the process by which a nucleic acid sequence undergoes successful transcription and in most instances translation to produce a protein or peptide. For clarity, when reference is made to measurement of “gene expression”, this should be understood to mean that measurements may be of the nucleic acid product of transcription, e.g., RNA or mRNA or of the amino acid product of translation, e.g., polypeptides or peptides. Methods of measuring the amount or levels of RNA, mRNA, polypeptides and peptides are well known in the art.

[0603] Homology: As used herein, the term “homology” refers to the overall relatedness between polymeric molecules, e.g. between polynucleotide molecules (e.g. DNA molecules and/or RNA molecules) and/or between polypeptide molecules. In some embodiments, polymeric molecules are considered to be “homologous” to one another if their sequences are at least 25%, 30%, 35%, 40%, 45%, 50%, 55%, 60%, 65%, 70%, 75%, 80%, 85%, 90%, 95%, or 99% identical or similar. The term “homologous” necessarily refers to a comparison between at least two sequences (polynucleotide or polypeptide sequences). In accordance with the disclosure, two polynucleotide sequences are considered to be homologous if the polypeptides they encode are at least about 50%, 60%, 70%, 80%, 90%, 95%, or even 99% for at least one stretch of at least about 20 amino acids. In some embodiments, homologous polynucleotide sequences are characterized by the ability to encode a stretch of at least 4-5 uniquely specified amino acids. For polynucleotide sequences less than 60 nucleotides in length, homology is determined by the ability to encode a stretch of at least 4-5 uniquely specified amino acids. In accordance with the disclosure, two protein sequences are considered to be homologous if the proteins are at least about 50%, 60%, 70%, 80%, or 90% identical for at least one stretch of at least about 20 amino acids.

[0604] Heterologous Region: As used herein the term “heterologous region” refers to a region which would not be considered a homologous region.

[0605] Homology directed repair (HL)R): As used herein, the term “homology directed repair” refers to a mechanism in cells to repair DNA double-strand break using a homologous template. HDR generally requires a DNA donor template for requisite sequence homology with the sequence flanking the double-strand break so that the DNA donor can serve as a suitable template for repair. In some embodiments, HDR results in the replacement of the entire DNA donor or a portion of the DNA donor sequence at the site of the DNA target sequence.

[0606] Homologous Region: As used herein the term “homologous region” refers to a region which is similar in position, structure, evolution origin, character, form or function.

[0607] Identity: As used herein, the term “identity” refers to the overall relatedness between polymeric molecules, e.g., between polynucleotide molecules (e.g. DNA molecules and/or RNA molecules) and/or between polypeptide molecules. Calculation of the percent identity of two polynucleotide sequences, for example, can be performed by aligning the two sequences for optimal comparison purposes (e.g., gaps can be introduced in one or both of a first and a second nucleic acid sequences for optimal alignment and non-identical sequences can be disregarded for comparison purposes). In certain embodiments, the length of a sequence aligned for comparison purposes is at least 30%, at least 40%, at least 50%, at least 60%, at least 70%, at least 80%, at least 90%, at least 95%, or 100% of the length of the reference sequence. The nucleotides at corresponding nucleotide positions are then compared. When a position in the first sequence is occupied by the same nucleotide as the corresponding position in the second sequence, then the molecules are identical at that position. The percent identity between the two sequences is a function of the number of identical positions shared by the sequences, taking into account the number of gaps, and the length of each gap, which needs to be introduced for optimal alignment of the two sequences. The comparison of sequences and determination of percent identity between two sequences can be accomplished using a mathematical algorithm. For example, the percent identity between two nucleotide sequences can be determined using methods such as those described in Computational Molecular Biology, Lesk, A. M., ed., Oxford University Press, New York, 1988; Biocomputing: Informatics and Genome Projects, Smith, D. W., ed., Academic Press, New York, 1993; Sequence Analysis in Molecular Biology, von Heinje, G., Academic Press, 1987; Computer Analysis of Sequence Data. Part I, Griffin, A. M., and Griffin, H. G., eds., Humana Press, New Jersey, 1994; and Sequence Analysis Primer. Gribskov, M. and Devereux, J., eds., M Stockton Press, New York, 1991; each of which is incorporated herein by reference. For example, the percent identity between two nucleotide sequences can be determined using the algorithm of Meyers and Miller (CABIOS, 1989, 4:11-17), which has been incorporated into the ALIGN program (version 2.0) using a PAM120 weight residue table, a gap length penalty of 12 and a gap penalty of 4. The percent identity between two nucleotide sequences can, alternatively, be determined using the GAP program in the GCG software package using an NWSgapdna.CMP matrix. Methods commonly employed to determine percent identity between sequences include, but are not limited to those disclosed in Carillo, H. and Lipman, D., SIAM J Applied Math., 48:1073 (1988); incorporated herein by reference. Techniques for determining identity are codified in publicly available computer programs. Exemplary computer software to determine homology between two sequences include, but are not limited to, GCG program package, Devereux, J., et al., Nucleic Acids Research, 12(1), 387 (1984)), BLASTP, BLASTN, and FASTA Altschul, S. F. et al., J. Molec. Biol., 215, 403 (1990)).

[0608] Inhibit expression of a gene: As used herein, the phrase “inhibit expression of a gene” means to cause a reduction in the amount of an expression product of the gene. The expression product can be an RNA transcribed from the gene (e.g., an mRNA) or a polypeptide translated from an mRNA transcribed from the gene. Typically, a reduction in the level of an mRNA results in a reduction in the level of a polypeptide translated therefrom. The level of expression may be determined using standard techniques for measuring mRNA or protein.

[0609] In vitro: As used herein, the term “in vitro” refers to events that occur in an artificial environment, e.g., in a test tube or reaction vessel, in cell culture, in a Petri dish, etc., rather than within an organism (e.g., animal, plant, or microbe).

[0610] In vivo: As used herein, the term “in vivo” refers to events that occur within an organism (e.g., animal, plant, or microbe or cell or tissue thereof).

[0611] Isolated: As used herein, the term “isolated” refers to a substance or entity that has been separated from at least some of the components with which it was associated (whether in nature or in an experimental setting). Isolated substances may have varying levels of purity in reference to the substances from which they have been associated. Isolated substances and/or entities may be separated from at least about 10%, about 20%, about 30%, about 40%, about 50%, about 60%, about 70%, about 80%, about 90%, or more of the other components with which they were initially associated. In some embodiments, isolated agents are more than about 80%, about 85%, about 90%, about 91%, about 92%, about 93%, about 94%, about 95%, about 96%, about 97%, about 98%, about 99%, or more than about 99% pure. As used herein, a substance is “pure” if it is substantially free of other components.

[0612] Substantially isolated: By “substantially isolated” is meant that a substance is substantially separated from the environment in which it was formed or detected. Partial separation can include, for example, a composition enriched in the substance or AAV particles of the present disclosure. Substantial separation can include compositions containing at least about 50%, at least about 60%, at least about 70%, at least about 80%, at least about 90%, at least about 95%, at least about 97%, or at least about 99% by weight of the compound of the present disclosure, or salt thereof. Methods for isolating compounds and their salts are routine in the art.

[0613] Linker: As used herein “linker” refers to a molecule or group of molecules which connects two molecules. A linker may be a nucleic acid sequence connecting two nucleic acid sequences encoding two different polypeptides. The linker may or may not be translated. The linker may be a cleavable linker.

[0614] MicroRNA (miRNA) binding site: As used herein, a microRNA (miRNA) binding site represents a nucleotide location or region of a nucleic acid transcript to which at least the “seed” region of a miRNA binds.

[0615] Modified: As used herein “modified” refers to a changed state or structure of a molecule. Molecules may be modified in many ways including chemically, structurally, and functionally.

[0616] Naturally Occurring: As used herein, “naturally occurring” or “wild-type” means existing in nature without artificial aid, or involvement of the hand of man.

[0617] Non-homologous end joining repair: As used herein, the term “non-homologous end joining repair” refers to a mechanism to repair double-strand break in DNA by direct ligation of one end of the break to the other end without a requirement for a DNA donor template. NHEJ is an error-prone DNA repair pathway without the use of repair template and often results nucleotide being randomly inserted or deleted (Indel) at the site of the double strand break.

[0618] Non-human vertebrate: As used herein, a “non-human vertebrate” includes all vertebrates except Homo sapiens, including wild and domesticated species. Examples of non-human vertebrates include, but are not limited to, mammals, such as alpaca, banteng, bison, camel, cat, cattle, deer, dog, donkey, gayal, goat, guinea pig, horse, llama, mule, pig, rabbit, reindeer, sheep water buffalo, and yak.

[0619] Off-target: As used herein, “off target” refers to any unintended effect on any one or more target, gene, or cellular transcript.

[0620] Open reading frame: As used herein, “open reading frame” or “ORF” refers to a sequence which does not contain a stop codon in a given reading frame.

[0621] Operably linked: As used herein, the phrase “operably linked” refers to a functional connection between two or more molecules, constructs, transcripts, entities, moieties or the like.

[0622] Parent sequence: As used herein, a “parent sequence” is a nucleic acid or amino acid sequence from which a variant is derived. In some embodiments, a parent sequence is a sequence into which a heterologous sequence is inserted. In other words, a parent sequence may be considered an acceptor or recipient sequence. In some embodiments, a parent sequence is an AAV capsid sequence into which a targeting sequence is inserted.

[0623] Particle: As used herein, a “particle” is a virus comprised of at least two components, a protein capsid and a polynucleotide sequence enclosed within the capsid.

[0624] Patient: As used herein, “patient” refers to a subject who may seek or be in need of treatment, requires treatment, is receiving treatment, will receive treatment, or a subject who is under care by a trained professional for a particular disease or condition.

[0625] Payload: As used herein. “payload” or “payload region” refers to one or more polynucleotides or polynucleotide regions encoded by or within a vector genome or an expression product of such polynucleotide or polynucleotide region, e.g., a transgene, a polynucleotide encoding a polypeptide or multi-polypeptide or a modulatory nucleic acid or regulatory nucleic acid.

[0626] Payload construct: As used herein, “payload construct” or “construct” is one or more polynucleotide regions encoding or comprising a payload that is flanked on one or both sides by an inverted terminal repeat (ITR) sequence. The payload construct is a template that is replicated in a viral production cell to produce a vector genome.

[0627] Payload construct vector: As used herein. “payload construct vector” is a vector encoding or comprising a payload construct, and regulatory regions for replication and expression in bacterial cells.

[0628] Payload construct expression vector: As used herein, a “payload construct expression vector” is a vector encoding or comprising a payload construct and which further comprises one or more polynucleotide regions encoding or comprising components for viral expression in a viral replication cell.

[0629] Peptide: As used herein, “peptide” is less than or equal to 50 amino acids long, e.g., about 5, 10, 15, 20, 25, 30, 35, 40, 45, or 50 amino acids long.

[0630] Pharmaceutically acceptable: The phrase “pharmaceutically acceptable” is employed herein to refer to those compounds, materials, compositions, and/or dosage forms which are, within the scope of sound medical judgment, suitable for use in contact with the tissues of human beings and animals without excessive toxicity, irritation, allergic response, or other problem or complication, commensurate with a reasonable benefit/risk ratio.

[0631] Pharmaceutically acceptable excipients: The phrase “pharmaceutically acceptable excipient.” as used herein, refers any ingredient other than the compounds described herein (for example, a vehicle capable of suspending or dissolving the active compound) and having the properties of being substantially nontoxic and non-inflammatory in a patient. Excipients may include, for example: antiadherents, antioxidants, binders, coatings, compression aids, disintegrants, dyes (colors), emollients, emulsifiers, fillers (diluents), film formers or coatings, flavors, fragrances, glidants (flow enhancers), lubricants, preservatives, printing inks, sorbents, suspensing or dispersing agents, sweeteners, and waters of hydration. Exemplary excipients include, but are not limited to: butylated hydroxytoluene (BHT), calcium carbonate, calcium phosphate (dibasic), calcium stearate, croscarmellose, crosslinked polyvinyl pyrrolidone, citric acid, crospovidone, cysteine, ethylcellulose, gelatin, hydroxypropyl cellulose, hydroxypropyl methylcellulose, lactose, magnesium stearate, maltitol, mannitol, methionine, methylcellulose, methyl paraben, microcrystalline cellulose, polyethylene glycol, polyvinyl pyrrolidone, povidone, pregelatinized starch, propyl paraben, retinyl palmitate, shellac, silicon dioxide, sodium carboxymethyl cellulose, sodium citrate, sodium starch glycolate, sorbitol, starch (corn), stearic acid, sucrose, talc, titanium dioxide, vitamin A, vitamin E, vitamin C, and xylitol.

[0632] Pharmaceutically acceptable salts: The present disclosure also includes pharmaceutically acceptable salts of the compounds described herein. As used herein, “pharmaceutically acceptable salts” refers to derivatives of the disclosed compounds wherein the parent compound is modified by converting an existing acid or base moiety to its salt form (e.g., by reacting the free base group with a suitable organic acid). Examples of pharmaceutically acceptable salts include, but are not limited to, mineral or organic acid salts of basic residues such as amines; alkali or organic salts of acidic residues such as carboxylic acids; and the like. Representative acid addition salts include acetate, acetic acid, adipate, alginate, ascorbate, aspartate, benzenesulfonate, benzene sulfonic acid, benzoate, bisulfate, borate, butyrate, camphorate, camphorsulfonate, citrate, cyclopentanepropionate, digluconate, dodecylsulfate, ethanesulfonate, fumarate, glucoheptonate, glycerophosphate, hemisulfate, heptonate, hexanoate, hydrobromide, hydrochloride, hydroiodide, 2-hydroxy-ethanesulfonate, lactobionate, lactate, laurate, lauryl sulfate, malate, maleate, malonate, methanesulfonate, 2-naphthalenesulfonate, nicotinate, nitrate, oleate, oxalate, palmitate, pamoate, pectinate, persulfate, 3-phenylpropionate, phosphate, picrate, pivalate, propionate, stearate, succinate, sulfate, tartrate, thiocyanate, toluenesulfonate, undecanoate, valerate salts, and the like. Representative alkali or alkaline earth metal salts include sodium, lithium, potassium, calcium, magnesium, and the like, as well as nontoxic ammonium, quaternary ammonium, and amine cations, including, but not limited to ammonium, tetramethylammonium, tetraethylammonium, methylamine, dimethylamine, trimethylamine, triethylamine, ethylamine, and the like. The pharmaceutically acceptable salts of the present disclosure include the conventional non-toxic salts of the parent compound formed, for example, from non-toxic inorganic or organic acids. The pharmaceutically acceptable salts of the present disclosure can be synthesized from the parent compound which contains a basic or acidic moiety by conventional chemical methods. Generally, such salts can be prepared by reacting the free acid or base forms of these compounds with a stoichiometric amount of the appropriate base or acid in water or in an organic solvent, or in a mixture of the two; generally, nonaqueous media like ether, ethyl acetate, ethanol, isopropanol, or acetonitrile are preferred. Lists of suitable salts are found in Remington's Pharmaceutical Sciences, 171 ed., Mack Publishing Company, Easton, Pa., 1985, p. 1418, Pharmaceutical Salts: Properties, Selection, and Use, P. H. Stahl and C. G. Wermuth (eds.), Wiley-VCH, 2008, and Berge et al., Journal of Pharmaceutical Science, 66, 1-19 (1977), each of which is incorporated herein by reference in its entirety.

[0633] Pharmaceutically acceptable solvate: The term “pharmaceutically acceptable solvate,” as used herein, means a compound wherein molecules of a suitable solvent are incorporated in the crystal lattice. A suitable solvent is physiologically tolerable at the dosage administered. For example, solvates may be prepared by crystallization, recrystallization, or precipitation from a solution that includes organic solvents, water, or a mixture thereof. Examples of suitable solvents are ethanol, water (for example, mono-, di-, and tri-hydrates), N-methylpyrrolidinone (NMP), dimethyl sulfoxide (DMSO), N,N′-dimethylformamide (DMF), N,N′-dimethylacetamide (DMAC), 1,3-dimethyl-2-imidazolidinone (DMEU), 1,3-dimethyl-3,4,5,6-tetrahydro-2-(1H)-pyrimidinone (DMPU), acetonitrile (ACN), propylene glycol, ethyl acetate, benzyl alcohol, 2-pyrrolidone, benzyl benzoate, and the like. When water is the solvent, the solvate is referred to as a “hydrate.”

[0634] Pharmacokinetic: As used herein, “pharmacokinetic” refers to any one or more properties of a molecule or compound as it relates to the determination of the fate of substances administered to a living organism. Pharmacokinetics is divided into several areas including the extent and rate of absorption, distribution, metabolism and excretion. This is commonly referred to as ADME where: (A) Absorption is the process of a substance entering the blood circulation; (D) Distribution is the dispersion or dissemination of substances throughout the fluids and tissues of the body; (M) Metabolism (or Biotransformation) is the irreversible transformation of parent compounds into daughter metabolites; and (E) Excretion (or Elimination) refers to the elimination of the substances from the body. In rare cases, some drugs irreversibly accumulate in body tissue.

[0635] Physicochemical: As used herein, “physicochemical” means of or relating to a physical and/or chemical property.

[0636] Preventing: As used herein, the term “preventing” refers to partially or completely delaying onset of an infection, disease, disorder and/or condition; partially or completely delaying onset of one or more symptoms, features, or clinical manifestations of a particular infection, disease, disorder, and/or condition; partially or completely delaying onset of one or more symptoms, features, or manifestations of a particular infection, disease, disorder, and/or condition; partially or completely delaying progression from an infection, a particular disease, disorder and/or condition: and/or decreasing the risk of developing pathology associated with the infection, the disease, disorder, and/or condition.

[0637] Proliferate: As used herein, the term “proliferate” means to grow, expand or increase or cause to grow, expand or increase rapidly. “Proliferative” means having the ability to proliferate. “Anti-proliferative” means having properties counter to or inapposite to proliferative properties.

[0638] Prophylactic: As used herein, “prophylactic” refers to a therapeutic or course of action used to prevent the spread of disease.

[0639] Prophylaxis: As used herein, a “prophylaxis” refers to a measure taken to maintain health and prevent the spread of disease.

[0640] Protein of interest: As used herein, the terms “proteins of interest” or “desired proteins” include those provided herein and fragments, mutants, variants, and alterations thereof.

[0641] Proximal: As used herein, the term “proximal” means situated nearer to the center or to a point or region of interest.

[0642] Purified: As used herein, “purify,” “purified,” “purification” means to make substantially pure or clear from unwanted components, material defilement, admixture or imperfection. “Purified” refers to the state of being pure. “Purification” refers to the process of making pure.

[0643] Regulatable CRISPR genome-editing element: As used herein, the term “regulatable genome-editing element” refers to one or more polynucleotides encoding any regulatable or tunable component and any component of a CRISPR system including, but not limited, to one or more gRNA, one or more donor DNA templates, a Cas9, a Cas9 orthologue, a Cpf1 or a Cpf1 orthologues which impart regulatable or tunable feature to a viral genome encoding them. Where CRISPR regulatable elements are present, the AAV particle may be referred to as a “regulatable CRISPR-AAV particle” or “Tunable CRISPR-AAV particle.”

[0644] Regulatable Elements: As used herein, the term “regulatable element” refers to one or more components, factors, polynucleotide features or motifs which imparts regulatable or tunable features to regulate the expression of a payload. The expression of the regulatable elements may also be further regulated.

[0645] Region: As used herein, the term “region” refers to a zone or general area. In some embodiments, when referring to a protein or protein module, a region may comprise a linear sequence of amino acids along the protein or protein module or may comprise a three-dimensional area, an epitope and/or a cluster of epitopes. In some embodiments, regions comprise terminal regions. As used herein, the term “terminal region” refers to regions located at the ends or termini of a given agent. When referring to proteins, terminal regions may comprise N- and/or C-termini. N-termini refer to the end of a protein comprising an amino acid with a free amino group. C-termini refer to the end of a protein comprising an amino acid with a free carboxyl group. N- and/or C-terminal regions may there for comprise the N- and/or C-termini as well as surrounding amino acids. In some embodiments, N- and/or C-terminal regions comprise from about 3 amino acid to about 30 amino acids, from about 5 amino acids to about 40 amino acids, from about 10 amino acids to about 50 amino acids, from about 20 amino acids to about 100 amino acids and/or at least 100 amino acids. In some embodiments, N-terminal regions may comprise any length of amino acids that includes the N-terminus, but does not include the C-terminus. In some embodiments, C-terminal regions may comprise any length of amino acids, which include the C-terminus, but do not comprise the N-terminus.

[0646] In some embodiments, when referring to a polynucleotide, a region may comprise a linear sequence of nucleic acids along the polynucleotide or may comprise a three-dimensional area, secondary structure, or tertiary structure. In some embodiments, regions comprise terminal regions. As used herein, the term “terminal region” refers to regions located at the ends or termini of a given agent. When referring to polynucleotides, terminal regions may comprise 5′ and 3′ termini. 5′ termini refer to the end of a polynucleotide comprising a nucleic acid with a free phosphate group. 3′ termini refer to the end of a polynucleotide comprising a nucleic acid with a free hydroxyl group. 5′ and 3′ regions may there for comprise the 5′ and 3′ termini as well as surrounding nucleic acids. In some embodiments, 5′ and 3′ terminal regions comprise from about 9 nucleic acids to about 90 nucleic acids, from about 15 nucleic acids to about 120 nucleic acids, from about 30 nucleic acids to about 150 nucleic acids, from about 60 nucleic acids to about 300 nucleic acids and/or at least 300 nucleic acids. In some embodiments, 5′ regions may comprise any length of nucleic acids that includes the 5′ terminus, but does not include the 3′ terminus. In some embodiments, 3′ regions may comprise any length of nucleic acids, which include the 3′ terminus, but does not comprise the 5′ terminus.

[0647] RNA or RNA molecule: As used herein, the term “RNA” or “RNA molecule” or “ribonucleic acid molecule” refers to a polymer of ribonucleotides: the term “DNA” or “DNA molecule” or “deoxyribonucleic acid molecule” refers to a polymer of deoxyribonucleotides. DNA and RNA can be synthesized naturally, e.g., by DNA replication and transcription of DNA, respectively; or be chemically synthesized. DNA and RNA can be single-stranded (i.e., ssRNA or ssDNA, respectively) or multi-stranded (e.g., double stranded, i.e., dsRNA and dsDNA, respectively). The term “mRNA” or “messenger RNA”, as used herein, refers to a single stranded RNA that encodes the amino acid sequence of one or more polypeptide chains.

[0648] Sample: As used herein, the term “sample” or “biological sample” refers to a subset of its tissues, cells or component parts (e.g. body fluids, including but not limited to blood, mucus, lymphatic fluid, synovial fluid, cerebrospinal fluid, saliva, amniotic fluid, amniotic cord blood, urine, vaginal fluid and semen). A sample further may include a homogenate, lysate or extract prepared from a whole organism or a subset of its tissues, cells or component parts, or a fraction or portion thereof, including but not limited to, for example, plasma, serum, spinal fluid, lymph fluid, the external sections of the skin, respiratory, intestinal, and genitourinary tracts, tears, saliva, milk, blood cells, tumors, organs. A sample further refers to a medium, such as a nutrient broth or gel, which may contain cellular components, such as proteins or nucleic acid molecule.

[0649] Self-complementary viral particle: As used herein, a “self-complementary viral particle” is a particle comprised of at least two components, a protein capsid and a polynucleotide sequence encoding a self-complementary genome enclosed within the capsid.

[0650] Signal Sequences: As used herein, the phrase “signal sequences” refers to a sequence which can direct the transport or localization of a protein.

[0651] Single unit dose: As used herein, a “single unit dose” is a dose of any therapeutic administered in one dose/at one time/single route/single point of contact, i.e., single administration event. In some embodiments, a single unit dose is provided as a discrete dosage form (e.g., a tablet, capsule, patch, loaded syringe, vial, etc.).

[0652] Similarity: As used herein, the term “similarity” refers to the overall relatedness between polymeric molecules, e.g. between polynucleotide molecules (e.g. DNA molecules and/or RNA molecules) and/or between polypeptide molecules. Calculation of percent similarity of polymeric molecules to one another can be performed in the same manner as a calculation of percent identity, except that calculation of percent similarity takes into account conservative substitutions as is understood in the art.

[0653] Split dose: As used herein, a “split dose” is the division of single unit dose or total daily dose into two or more doses.

[0654] Stable: As used herein “stable” refers to a compound that is sufficiently robust to survive isolation to a useful degree of purity from a reaction mixture, and preferably capable of formulation into an efficacious therapeutic agent.

[0655] Stabilized: As used herein, the term “stabilize”, “stabilized,” “stabilized region” means to make or become stable.

[0656] Subject: As used herein, the term “subject” or “patient” refers to any organism to which a composition in accordance with the disclosure may be administered, e.g., for experimental, diagnostic, prophylactic, and/or therapeutic purposes. Typical subjects include animals (e.g., mammals such as mice, rats, rabbits, non-human primates, and humans) and/or plants.

[0657] Substantially: As used herein, the term “substantially” refers to the qualitative condition of exhibiting total or near-total extent or degree of a characteristic or property of interest. One of ordinary skill in the biological arts will understand that biological and chemical phenomena rarely, if ever, go to completion and/or proceed to completeness or achieve or avoid an absolute result. The term “substantially” is therefore used herein to capture the potential lack of completeness inherent in many biological and chemical phenomena.

[0658] Substantially equal: As used herein as it relates to time differences between doses, the term means plus/minus 2%.

[0659] Substantially simultaneously: As used herein and as it relates to plurality of doses, the term means within 2 seconds.

[0660] Suffering from: An individual who is “suffering from” a disease, disorder, and/or condition has been diagnosed with or displays one or more symptoms of a disease, disorder, and/or condition.

[0661] Susceptible to: An individual who is “susceptible to” a disease, disorder, and/or condition has not been diagnosed with and/or may not exhibit symptoms of the disease, disorder, and/or condition but harbors a propensity to develop a disease or its symptoms. In some embodiments, an individual who is susceptible to a disease, disorder, and/or condition (for example, cancer) may be characterized by one or more of the following: (1) a genetic mutation associated with development of the disease, disorder, and/or condition; (2) a genetic polymorphism associated with development of the disease, disorder, and/or condition; (3) increased and/or decreased expression and/or activity of a protein and/or nucleic acid associated with the disease, disorder, and/or condition; (4) habits and/or lifestyles associated with development of the disease, disorder, and/or condition; (5) a family history of the disease, disorder, and/or condition; and (6) exposure to and/or infection with a microbe associated with development of the disease, disorder, and/or condition. In some embodiments, an individual who is susceptible to a disease, disorder, and/or condition will develop the disease, disorder, and/or condition. In some embodiments, an individual who is susceptible to a disease, disorder, and/or condition will not develop the disease, disorder, and/or condition.

[0662] Sustained release: As used herein, the term “sustained release” refers to a pharmaceutical composition or compound release profile that conforms to a release rate over a specific period of time.

[0663] Synthetic: The term “synthetic” means produced, prepared, and/or manufactured by the hand of man. Synthesis of polynucleotides or polypeptides or other molecules of the present disclosure may be chemical or enzymatic.

[0664] Targeting: As used herein, “targeting” means the process of design and selection of nucleic acid sequence that will hybridize to a target nucleic acid and induce a desired effect.

[0665] Targeted Cells: As used herein, “targeted cells” refers to any one or more cells of interest. The cells may be found in vitro, in vivo, in situ or in the tissue or organ of an organism. The organism may be an animal, preferably a mammal, more preferably a human and most preferably a patient.

[0666] Therapeutic Agent: The term “therapeutic agent” refers to any agent that, when administered to a subject, has a therapeutic, diagnostic, and/or prophylactic effect and/or elicits a desired biological and/or pharmacological effect.

[0667] Therapeutically effective amount: As used herein, the term “therapeutically effective amount” means an amount of an agent to be delivered (e.g., nucleic acid, drug, therapeutic agent, diagnostic agent, prophylactic agent, etc.) that is sufficient, when administered to a subject suffering from or susceptible to an infection, disease, disorder, and/or condition, to treat, improve symptoms of, diagnose, prevent, and/or delay the onset of the infection, disease, disorder, and/or condition. In some embodiments, a therapeutically effective amount is provided in a single dose. In some embodiments, a therapeutically effective amount is administered in a dosage regimen comprising a plurality of doses. Those skilled in the art will appreciate that in some embodiments, a unit dosage form may be considered to comprise a therapeutically effective amount of a particular agent or entity if it comprises an amount that is effective when administered as part of such a dosage regimen.

[0668] Therapeutically effective outcome: As used herein, the term “therapeutically effective outcome” means an outcome that is sufficient in a subject suffering from or susceptible to an infection, disease, disorder, and/or condition, to treat, improve symptoms of, diagnose, prevent, and/or delay the onset of the infection, disease, disorder, and/or condition.

[0669] Total daily close: As used herein, a “total daily dose” is an amount given or prescribed in 24 hr. period. It may be administered as a single unit dose.

[0670] Transfection: As used herein, the term “transfection” refers to methods to introduce exogenous nucleic acids into a cell. Methods of transfection include, but are not limited to, chemical methods, physical treatments and cationic lipids or mixtures.

[0671] Treating: As used herein, the term “treating” refers to partially or completely alleviating, ameliorating, improving, relieving, delaying onset of, inhibiting progression of, reducing severity of, and/or reducing incidence of one or more symptoms or features of a particular infection, disease, disorder, and/or condition. For example, “treating” cancer may refer to inhibiting survival, growth, and/or spread of a tumor. Treatment may be administered to a subject who does not exhibit signs of a disease, disorder, and/or condition and/or to a subject who exhibits only early signs of a disease, disorder, and/or condition for the purpose of decreasing the risk of developing pathology associated with the disease, disorder, and/or condition.

[0672] Unmodified: As used herein, “unmodified” refers to any substance, compound or molecule prior to being changed in any way. Unmodified may, but does not always, refer to the wild type or native form of a biomolecule. Molecules may undergo a series of modifications whereby each modified molecule may serve as the “unmodified” starting molecule for a subsequent modification.

[0673] Vector: As used herein, a “vector” is any molecule or moiety which transports, transduces or otherwise acts as a carrier of a heterologous molecule. Vectors of the present disclosure may be produced recombinantly and may be based on and/or may comprise adeno-associated virus (AAV) parent or reference sequence. Such parent or reference AAV sequences may serve as an original, second, third or subsequent sequence for engineering vectors. In non-limiting examples, such parent or reference AAV sequences may comprise any one or more of the following sequences: a polynucleotide sequence encoding a polypeptide or multi-polypeptide, which sequence may be wild-type or modified from wild-type and which sequence may encode full-length or partial sequence of a protein, protein domain, or one or more subunits of a protein; a polynucleotide comprising a modulatory or regulatory nucleic acid which sequence may be wild-type or modified from wild-type; and a transgene that may or may not be modified from wild-type sequence. These AAV sequences may serve as either the “donor” sequence of one or more codons (at the nucleic acid level) or amino acids (at the polypeptide level) or “acceptor” sequences of one or more codons (at the nucleic acid level) or amino acids (at the polypeptide level).

[0674] Vector genome: As used herein, a “vector genome” or “viral genome” is a polynucleotide comprising at least one inverted terminal repeat (ITR) and at least one encoded payload. A vector genome encodes at least one copy of the payload.

[0675] Described herein are compositions, methods, processes, kits and devices for the design, preparation, manufacture and/or formulation of AAV particles. In some embodiments, payloads, such as but not limited to AAV polynucleotides, may be encoded by payload constructs or contained within plasmids or vectors or recombinant adeno-associated viruses (AAVs).

[0676] The details of one or more embodiments are set forth in the accompanying description below. Although any materials and methods similar or equivalent to those described herein can be used in the practice or testing of the present disclosure, the preferred materials and methods are now described. Other features, objects and advantages will be apparent from the description. In the description, the singular forms also include the plural unless the context clearly dictates otherwise. Unless defined otherwise, all technical and scientific terms used herein have the same meaning as commonly understood by one of ordinary skill in the art to which this disclosure belongs. In the case of conflict, the present description will control.

[0677] The present disclosure is further illustrated by the following non-limiting examples.

### VII. Equivalents and Scope

[0678] Those skilled in the art will recognize, or be able to ascertain using no more than routine experimentation, many equivalents to the specific embodiments in accordance with the invention described herein. The scope of the present disclosure is not intended to be limited to the above Description, but rather is as set forth in the appended claims.

[0679] In the claims, articles such as “a,” “an,” and “the” may mean one or more than one unless indicated to the contrary or otherwise evident from the context. Claims or descriptions that include “or” between one or more members of a group are considered satisfied if one, more than one, or all of the group members are present in, employed in, or otherwise relevant to a given product or process unless indicated to the contrary or otherwise evident from the context. The disclosure includes embodiments in which exactly one member of the group is present in, employed in, or otherwise relevant to a given product or process. The disclosure includes embodiments in which more than one, or the entire group members are present in, employed in, or otherwise relevant to a given product or process.

[0680] It is also noted that the term “comprising” is intended to be open and permits but does not require the inclusion of additional elements or steps. When the term “comprising” is used herein, the term “consisting of” is thus also encompassed and disclosed.

[0681] Where ranges are given, endpoints are included. Furthermore, it is to be understood that unless otherwise indicated or otherwise evident from the context and understanding of one of ordinary skill in the art, values that are expressed as ranges can assume any specific value or subrange within the stated ranges in different embodiments of the disclosure, to the tenth of the unit of the lower limit of the range, unless the context clearly dictates otherwise.

[0682] In addition, it is to be understood that any particular embodiment of the present disclosure that falls within the prior art may be explicitly excluded from any one or more of the claims. Since such embodiments are deemed to be known to one of ordinary skill in the art, they may be excluded even if the exclusion is not set forth explicitly herein. Any particular embodiment of the compositions of the disclosure (e.g., any antibiotic, therapeutic or active ingredient; any method of production; any method of use; etc.) can be excluded from any one or more claims, for any reason, whether or not related to the existence of prior art.

[0683] It is to be understood that the words which have been used are words of description rather than limitation, and that changes may be made within the purview of the appended claims without departing from the true scope and spirit of the disclosure in its broader aspects.

[0684] While the present disclosure has been described at some length and with some particularity with respect to the several described embodiments, it is not intended that it should be limited to any such particulars or embodiments or any particular embodiment, but it is to be construed with references to the appended claims so as to provide the broadest possible interpretation of such claims in view of the prior art and, therefore, to effectively encompass the intended scope of the disclosure.

### VIII. Examples

### Example 1. Gene Expression

[0685] The level of transgene expression by AAV particles and/or VAPs produced and purified by the methods described herein is determined by real-time quantitative polymerase chain reaction (qPCR). A culture of cells (sf9 or HEK293) engineered to produce helper components required for AAV production is infected by AAV particles and/or VAPs produced as described herein.

[0686] The target cells are harvested at a series of time points, lysed and the mRNA is purified. The level of transgene expressed is determined by reverse transcription (qPCR) on a thermal cycler equipped with an excitation source filters, and detector for quantification of the reaction such as, but not limited to, the 7500 FAST Real-Time PCR system (Applied Biosystems, Foster City Calif.).

[0687] AAV particles and/or VAPs produced and purified by the methods described herein are treated with proteinase K, serially diluted, and PCR-amplified using a fluor such as, but not limited to, SYBR green (Applied Biosystems, Foster City. Calif.) with primers specific to the transgene sequence. A reference transgene oligonucleotide is used as a copy number standard. The cycling conditions are: 95° C. for 3 min, followed by 35 cycles of 95° C. for 30 sec, 60° C. for 30 sec. and 72° C. for 30 sec.

### Example 2. Recombinant AAV Particles and/or VAPs Production in Invertebrate Cells

[0688] The viral construct vector encodes the three structural cap proteins, VP1, VP2, and VP3, in a single open reading frame regulated by utilization of both alternative splice acceptor and non-canonical translational initiation codon(s). In-frame and out-of-frame ATG triplets preventing translation initiation at a position between the VP1 and VP2 start codons are eliminated. Both Rep78 and Rep52 are translated from a single transcript: Rep78 translation initiates at a non-AUG codon and Rep52 translation initiates at the first AUG in the transcript.

[0689] The nucleotides that encode the structural VP1, VP2, and VP3 capsid proteins and non-structural Rep78 and Rep52 proteins are contained on one viral expression construct under control of the baculovirus major late promoter.

[0690] The payload construct vector encodes two ITR sequences flanking a transgene polynucleotide encoding a polypeptide or modulatory nucleic acid and/or one or more regulatable elements. The ITR sequences allow for replication of a polynucleotide encoding the transgene and ITR sequences alone that will be packaged within the capsid of the viral construct vector. The replicated polynucleotide encodes ITR sequences on the 5′ and 3′ ends of the molecule.

[0691] The payload construct vector and viral construct vector each comprise a Tn7 transposon element that transposes the ITR and payload sequences or the Rep and Cap sequences respectively to a bacmid that comprises the attTn7 attachment site. Competent bacterial DH10 cells are transfected with either the payload construct vector or viral construct vector. The resultant viral construct expression vector and payload construct expression vector produced in the competent cell are then purified by detergent lysis and purification on DNA columns.

[0692] Separate seed cultures of Sf9 cells in serum free suspension culture are transfected with the viral construct expression vector or payload construct expression vector. The cultures are maintained for 48 hours while baculovirus is produced and released into the medium. The baculovirus released into the media continue to infect Sf9 cells in an exponential manner until all of the Sf9 cells in the culture are infected at least once. The baculoviral infected insect cells (BIIC) and media of the seed culture is harvested and divided into aliquots before being frozen in liquid nitrogen.

[0693] A naïve population of un-transfected Sf9 cells is expanded in serum free suspension cell culture conditions. Once the culture growth has reached peak log phase in 1 L of media as measured by optical density the culture is added to a large volume 20 L bioreactor. The bioreactor culture is co-inoculated with a frozen viral construct expression vector and payload construct expression vector BIIC aliquot. The conditions of the Sf9 cell suspension culture is monitored by instruments that measure and/or control external variables that support the growth and activity of viral replication cells such as mass, temperature, CO2, O2, pH, and/or optical density (OD). The Sf9 culture is maintained at optimal conditions until cell population growth has reached peak log phase and before cell growth has plateaued, as measured by optical density.

[0694] In each viral replication cell that has been infected with both baculoviruses the payload flanked on one end with an ITR sequence is replicated pathway producing a viral genome and packaged in a capsid assembled from the proteins VP1, VP2, and VP3.

[0695] The viral replication cells are lysed using the Microfluidizer™ (Microfluidics International Corp., Newton, Mass.), high shear force fluid processor. The resultant cell lysate is clarified by low speed centrifugation followed by tangential flow filtration. The resultant clarified lysate is filtered by a size exclusion column to remove any remaining baculoviral particles from solution. The final steps utilize ultracentrifugation and sterile filtration to produce viral particles suitable for use as described herein.

[0696] The titer of AAV particles produced and purified by the methods described herein is determined by real-time quantitative polymerase chain reaction (qPCR) on a thermal cycler equipped with an excitation source filters, and detector for quantification of the reaction such as, but not limited to, the 7500 FAST Real-Time PCR system (Applied Biosystems, Foster City Calif.). AAV particles produced and purified by the methods described herein is treated with proteinase K, serially diluted, and PCR-amplified using a fluor such as, but not limited to, SYBR green (Applied Biosystems, Foster City, Calif.) with primers specific to the AAV genome ITR sequences. A linearized viral genome is used as a copy number standard. The cycling conditions are: 95° C. for 3 min, followed by 35 cycles of 95° C. for 30 sec, 60° C. for 30 sec, and 72° C. for 30 sec.

### Example 3. Punctuated Expression of Cas9

[0697] In order to study methods to induce transient, burst expression of cas9, an AAV particle of Example 2 which encodes cas9, a DNA binding domain and a transactivating factor is prepared, produced and tested by methods known in the art and described herein. The cas9 sequence is located in the open reading frame of the vector and a DNA binding domain (DBD) and transactivating factor are located in VP2. The transactivating factor may be coupled to the DBD.

[0698] The DBD may be a pre-engineered DBD targeted specifically to the promoter used for cas9. While not wishing to be bound by theory, upon expression of VP2 in a biological system, the DBD locates and binds to the cas9 promoter. If the transactivating factor is for cas9 and the transactivating factor is coupled to the DBD, upon DBD binding to the cas9 promoter, the transactivating factor drives expression of cas9.

[0699] The nature of the interaction between the promoter and the DBD coupled to a transactivating factor generates a transient, burst expression of cas9. This punctuated expression may be beneficial as it may limit the possibility of side-effects of extended elevated expression of cas9.

[0700] To study the burst expression of cas9, an AAV particle with the DBD and the transactivating factor is purified and produced as described in Example 2. As a control, an AAV particle lacking the DBD and transactivating domain is produced in parallel.

[0701] Expression of cas9 is measured by methods described herein and known in the art, such as in HEK293 cells for the AAV particle with or without the DBD and transactivating factor. Cells are lysed at different time points and protein extracts are prepared for ELISA and Western blot analysis.

[0702] The specificity of cas9 cleavage is confirmed by deep sequencing of samples collected and the extent of dsDNA cleavage by cas9 or cas9-destabilizing domain fusion protein is measured by ligation-mediated purification or genome modification assays such as SURVEYOR. Indel percentage is calculated from the integrated intensities of the undigested PCR product and each of the cleavage products.

### Example 4. Regulation Through a CRISPR Regulatable Element

[0703] The ability of a CRISPR regulatable elements to regulate the expression of a luciferase payload composed of one or more CRISPR recognition sequences is tested in vitro and in vivo. Cleavage of the payload construct at the CRISPR recognition sequence ablates the payload expression. Using Cas9 with a destabilizing domain shortens the half-life of Cas9.

### In Vitro Testing

[0704] The following CRISPR-AAV constructs are prepared, produced and tested.

[0705] AAV construct 1 encodes a luciferase payload, which is driven by a constitutive promoter and which contains a CRISPR recognition sequence. The recognition sequence is chosen using methods known in the art and described herein to ensure that the sequence is unique to the viral genome and does not occur in the host genome. The AAV construct 2, which contains all of the components of construct 1, and additionally encodes a guide RNA specific to the CRISPR recognition sequence in the luciferase payload and a codon optimized Cas9 with a destabilizing domain. The guide RNA and Cas9 are both expressed from a constitutive promotor. Cas9 also contains a nuclear localization sequence. AAV construct 3 encodes luciferase driven by a CMV promoter without the CRISPR recognition sequence (positive control). AAV construct 4 contains all of the elements of construct 3, and further encodes a guide RNA specific to the CRISPR recognition sequence located in the luciferase payload and a Cas9 with a destabilizing domain. The guide RNA and Cas9 are both expressed from a constitutive promotor. Cas9 also contains a nuclear localization sequence.

[0706] In one example, two AAV vectors are used for transduction, one expressing the regulatable elements (Cas9 and guide RNA) and the other expressing the luciferase payload. These two vectors are delivered at a ratio determined to be optimal. Alternatively, one vector is used for transduction, expressing the regulatable elements and the luciferase payload.

[0707] HeLa cells are transduced with the AAV vector(s) constructs 1 through 4, according to methods known in the art in triplicate for each assay. The transduced HeLa cells are incubated in medium. Subsequently, cells are harvested according to a time course which includes 24, 48, and 72 hours. The cells are lysed and luciferase activity is measured and compared between the samples.

[0708] If the regulatable elements and the luciferase payload are on two separate vectors, the effective dose of the CRISPR regulatable element is determined. HeLa cells are transduced with construct 1 and different doses of the AAV vector encoding Cas9 and the guide RNA, each in triplicate. Cells are harvested, lysed and luciferase activity is measured for each dose of Cas9 and guide RNA employed.

### In Vivo Testing

[0709] The AAV constructs 1 and 2 are prepared, produced and tested. AAV particles 1 and 2 are each injected into mice of 3 to 5 months of age according to methods known in the art. At a set time post injection, such as for example 2 weeks, mice are injected with luciferin. Animals are then anesthetized, and images are acquired with an imaging system. Bioluminescence is measured as total flux (photons/second) of the entire mouse and compared between the samples.

### Example 5. Regulation Through an Inducible Element and a CRISPR Regulatable Element

[0710] The ability of an inducible system to regulate a CRISPR regulatable element, which in turn can regulate the payload in the context of AAV transduction is tested in vitro and in vivo. The ability of a regulatable element composed of two rapamycin inducible fusion proteins to regulate the expression of a CRISPR regulatable element is tested in vitro.

### In Vitro Testing

[0711] The following CRISPR-AAV constructs are prepared, produced and tested. AAV construct 1 encodes a luciferase payload, which contains a CRISPR recognition sequence, driven by a constitutive promoter. The recognition sequence is chosen using methods known in the art and described herein to ensure that the sequence is unique to the viral genome and does not occur in the host genome. AAV construct 2 contains the components of construct 1 and additionally encodes a guide RNA specific to the CRISPR recognition sequence located in the luciferase payload and a codon optimized Cas9 with a destabilizing domain. The guide RNA and Cas9 are both expressed from a constitutive promotor. Cas9 also contains a nuclear localization sequence. AAV construct 3 contains all of the components of construct 1, and additionally encodes a guide RNA specific to the CRISPR recognition sequence located in the luciferase payload and a codon optimized Cas9 with a destabilizing domain. The guide RNA and Cas9 are both expressed from a minimal promotor into which one or more ZHFD1 binding sites are inserted. Cas9 also contains a nuclear localization sequence. AAV construct 4 contains all of the components of construct 3, and additionally encodes two dimerizable fusion proteins, FKBP containing the DNA-binding domain of ZHFD1 and FRAP fused to the NF-kappaB p65 transactivation domain. The dimerizable fusion proteins are expressed from one constitutive promotor, and linked together through a 2A peptide sequence. The transcription factor and the transactivation domain fusion proteins both contain a nuclear localization sequence.

[0712] Two or more AAV vectors can be used for transduction, one or more expressing the regulatable elements (Cas9 and guide RNA, and dimerizable fusion proteins) and an additional vector expressing the luciferase payload. Alternatively, three AAV vectors are used, one encoding the CRISPR regulatable elements, one encoding the dimerizable fusion proteins, and one encoding the luciferase payload. These vectors are delivered at a ratio determined to be optimal. In another embodiment, one vector is used for transduction, expressing the regulatable elements and the luciferase payload. In some embodiments, an open reading frame for the DNA binding domain fusion protein and/or transactivation domain fusion protein is located in VP2.

[0713] HeLa cells are transduced with the AAV vector constructs 1 through 4, according to methods known in the art in triplicate for each assay. The transduced HeLa cells are incubated in medium in the presence or absence of rapamycin for a set time. Subsequently, cells are harvested according to a time course which includes 24, 48, and 72 hours. The cells are lysed and luciferase activity is measured. Throughout the time course, luciferase activity is compared between untreated and rapamycin treated samples for each AAV vector construct and also between samples transduced with the vector constructs 1 through 4.

### In Vivo Testing

[0714] The AAV constructs 1-4 are prepared, produced and tested. In addition, a 5^{th} construct may be added, which is the same as 4, except that the fusion proteins are driven by a tissue specific promoter, such as a liver specific promoter. AAV particles 1-4 are each injected into two mice of 3 to 5 months of age according to methods known in the art. At approximately 2 weeks post injection, a further injection of rapamycin is administered to half of the mice. At a predetermined time, mice are injected with luciferin. Animals are then anesthetized and images are acquired with an imaging system. Bioluminescence is measured as total flux (photons/second) of the entire mouse. Luciferase activity is compared between untreated and rapamycin treated animals and also between animals injected with the AAV particles 1-4.

The application's sequence listing, which the Patent Office published only in electronic form, follows.

SEQUENCE LISTING (1743 sequences)

SEQ ID NO: 1 - protein, 743 aa, Artificial Sequence
  source: /note="Description of Artificial Sequence: Synthetic polypeptide"
MAADGYLPDWLEDNLSEGIREWWALKPGAPQPKANQQHQDNARGLVLPGYKYLGPGNGLDKGEPVNAADAAALEHDKAYDQQLKAGDNPYLKYNHADAEFQERLKEDTSFGGNLGRAVFQAKKRLLEPLGLVEEAAKTAPGKKRPVEQSPQEPDSSAGIGKSGAQPAKKRLNFGQTGDTESVPDPQPIGEPPAAPSGVGSLTMASGGGAPVADNNEGADGVGSSSGNWHCDSQWLGDRVITTSTRTWALPTYNNHLYKQISNSTSGGSSNDNAYFGYSTPWGYFDFNRFHCHFSPRDWQRLINNNWGFRPKRLNFKLFNIQVKEVTDNNGVKTIANNLTSTVQVFTDSDYQLPYVLGSAHEGCLPPFPADVFMIPQYGYLTLNDGSQAVGRSSFYCLEYFPSQMLRTGNNFQFSYEFENVPFHSSYAHSQSLDRLMNPLIDQYLYYLSKTINGSGQNQQTLKFSVAGPSNMAVQGRNYIPGPSYRQQRVSTTVTQNNNSEFAWPGASSWALNGRNSLMNPGPAMASHKEGEDRFFPLSGSLIFGKQGTGRDNVDADKVMITNEEEIKTTNPVATESYGQVATNHQSDGTLAVPFKAQAQTGWVQNQGILPGMVWQDRDVYLQGPIWAKIPHTDGNFHPSPLMGGFGMKHPPPQILIKNTPVPADPPTAFNKDKLNSFITQYSTGQVSVEIEWELQKENSKRWNPEIQYTSNYYKSNNVEFAVNTEGVYSEPRPIGTRYLTRNL

SEQ ID NO: 2 - DNA, 2232 bp, Artificial Sequence
  source: /note="Description of Artificial Sequence: Synthetic polynucleotide"
atggctgccgatggttatcttccagattggctcgaggacaaccttagtgaaggaattcgcgagtggtgggctttgaaacctggagcccctcaacccaaggcaaatcaacaacatcaagacaacgctcgaggtcttgtgcttccgggttacaaataccttggacccggcaacggactcgacaagggggagccggtcaacgcagcagacgcggcggccctcgagcacgacaaggcctacgaccagcagctcaaggccggagacaacccgtacctcaagtacaaccacgccgacgccgagttccaggagcggctcaaagaagatacgtcttttgggggcaacctcgggcgagcagtcttccaggccaaaaagaggcttcttgaacctcttggtctggttgaggaagcggctaagacggctcctggaaagaagaggcctgtagagcagtctcctcaggaaccggactcctccgcgggtattggcaaatcgggtgcacagcccgctaaaaagagactcaatttcggtcagactggcgacacagagtcagtcccagaccctcaaccaatcggagaacctcccgcagccccctcaggtgtgggatctcttacaatggcttcaggtggtggcgcaccagtggcagacaataacgaaggtgccgatggagtgggtagttcctcgggaaattggcattgcgattcccaatggctgggggacagagtcatcaccaccagcacccgaacctgggccctgcccacctacaacaatcacctctacaagcaaatctccaacagcacatctggaggatcttcaaatgacaacgcctacttcggctacagcaccccctgggggtattttgacttcaacagattccactgccacttctcaccacgtgactggcagcgactcatcaacaacaactggggattccggcctaagcgactcaacttcaagctcttcaacattcaggtcaaagaggttacggacaacaatggagtcaagaccatcgccaataaccttaccagcacggtccaggtcttcacggactcagactatcagctcccgtacgtgctcgggtcggctcacgagggctgcctcccgccgttcccagcggacgttttcatgattcctcagtacgggtatctgacgcttaatgatggaagccaggccgtgggtcgttcgtccttttactgcctggaatatttcccgtcgcaaatgctaagaacgggtaacaacttccagttcagctacgagtttgagaacgtacctttccatagcagctacgctcacagccaaagcctggaccgactaatgaatccactcatcgaccaatacttgtactatctctcaaagactattaacggttctggacagaatcaacaaacgctaaaattcagtgtggccggacccagcaacatggctgtccagggaagaaactacatacctggacccagctaccgacaacaacgtgtctcaaccactgtgactcaaaacaacaacagcgaatttgcttggcctggagcttcttcttgggctctcaatggacgtaatagcttgatgaatcctggacctgctatggccagccacaaagaaggagaggaccgtttctttcctttgtctggatctttaatttttggcaaacaaggaactggaagagacaacgtggatgcggacaaagtcatgataaccaacgaagaagaaattaaaactactaacccggtagcaacggagtcctatggacaagtggccacaaaccaccagagtgatgggactttggcggtgccttttaaggcacaggcgcagaccggctgggttcaaaaccaaggaatacttccgggtatggtttggcaggacagagatgtgtacctgcaaggacccatttgggccaaaattcctcacacggacggcaactttcacccttctccgctgatgggagggtttggaatgaagcacccgcctcctcagatcctcatcaaaaacacacctgtacctgcggatcctccaacggccttcaacaaggacaagctgaactctttcatcacccagtattctactggccaagtcagcgtggagatcgagtgggagctgcagaaggaaaacagcaagcgctggaacccggagatccagtacacttccaactattacaagtctaataatgttgaatttgctgttaatactgaaggtgtatatagtgaaccccgccccattggcaccagatacctgactcgtaatctgtaa

SEQ ID NO: 3 - DNA, 2232 bp, Artificial Sequence
  source: /note="Description of Artificial Sequence: Synthetic polynucleotide"
atggctgccgatggttatcttccagattggctcgaggacaaccttagtgaaggaattcgcgagtggtgggctttgaaacctggagcccctcaacccaaggcaaatcaacaacatcaagacaacgctcgaggtcttgtgcttccgggttacaaataccttggacccggcaacggactcgacaagggggagccggtcaacgcagcagacgcggcggccctcgagcacgacaaggcctacgaccagcagctcaaggccggagacaacccgtacctcaagtacaaccacgccgacgccgagttccaggagcggctcaaagaagatacgtcttttgggggcaacctcgggcgagcagtcttccaggccaaaaagaggcttcttgaacctcttggtctggttgaggaagcggctaagacggctcctggaaagaagaggcctgtagagcagtctcctcaggaaccggactcctccgcgggtattggcaaatcgggtgcacagcccgctaaaaagagactcaatttcggtcagactggcgacacagagtcagtcccagaccctcaaccaatcggagaacctcccgcagccccctcaggtgtgggatctcttacaatggcttcaggtggtggcgcaccagtggcagacaataacgaaggtgccgatggagtgggtagttcctcgggaaattggcattgcgattcccaatggctgggggacagagtcatcaccaccagcacccgaacctgggccctgcccacctacaacaatcacctctacaagcaaatctccaacagcacatctggaggatcttcaaatgacaacgcctacttcggctacagcaccccctgggggtattttgacttcaacagattccactgccacttctcaccacgtgactggcagcgactcatcaacaacaactggggattccggcctaagcgactcaacttcaagctcttcaacattcaggtcaaagaggttacggacaacaatggagtcaagaccatcgccaataaccttaccagcacggtccaggtcttcacggactcagactatcagctcccgtacgtgctcgggtcggctcacgagggctgcctcccgccgttcccagcggacgttttcatgattcctcagtacgggtatctgacgcttaatgatggaagccaggccgtgggtcgttcgtccttttactgcctggaatatttcccgtcgcaaatgctaagaacgggtaacaacttccagttcagctacgagtttgagaacgtacctttccatagcagctacgctcacagccaaagcctggaccgactaatgaatccactcatcgaccaatacttgtactatctctcaaagactattaacggttctggacagaatcaacaaacgctaaaattcagtgtggccggacccagcaacatggctgtccagggaagaaactacatacctggacccagctaccgacaacaacgtgtctcaaccactgtgactcaaaacaacaacagcgaatttgcttggcctggagcttcttcttgggctctcaatggacgtaatagcttgatgaatcctggacctgctatggccagccacaaagaaggagaggaccgtttctttcctttgtctggatctttaatttttggcaaacaaggaactggaagagacaacgtggatgcggacaaagtcatgataaccaacgaagaagaaattaaaactactaacccggtagcaacggagtcctatggacaagtggccacaaaccaccagagtgcccaaactttggcggtgccttttaaggcacaggcgcagaccggctgggttcaaaaccaaggaatacttccgggtatggtttggcaggacagagatgtgtacctgcaaggacccatttgggccaaaattcctcacacggacggcaactttcacccttctccgctgatgggagggtttggaatgaagcacccgcctcctcagatcctcatcaaaaacacacctgtacctgcggatcctccaacggccttcaacaaggacaagctgaactctttcatcacccagtattctactggccaagtcagcgtggagatcgagtgggagctgcagaaggaaaacagcaagcgctggaacccggagatccagtacacttccaactattacaagtctaataatgttgaatttgctgttaatactgaaggtgtatatagtgaaccccgccccattggcaccagatacctgactcgtaatctgtaa

SEQ ID NO: 4 - protein, 743 aa, Artificial Sequence
  source: /note="Description of Artificial Sequence: Synthetic polypeptide"
MAADGYLPDWLEDNLSEGIREWWALKPGAPQPKANQQHQDNARGLVLPGYKYLGPGNGLDKGEPVNAADAAALEHDKAYDQQLKAGDNPYLKYNHADAEFQERLKEDTSFGGNLGRAVFQAKKRLLEPLGLVEEAAKTAPGKKRPVEQSPQEPDSSAGIGKSGAQPAKKRLNFGQTGDTESVPDPQPIGEPPAAPSGVGSLTMASGGGAPVADNNEGADGVGSSSGNWHCDSQWLGDRVITTSTRTWALPTYNNHLYKQISNSTSGGSSNDNAYFGYSTPWGYFDFNRFHCHFSPRDWQRLINNNWGFRPKRLNFKLFNIQVKEVTDNNGVKTIANNLTSTVQVFTDSDYQLPYVLGSAHEGCLPPFPADVFMIPQYGYLTLNDGSQAVGRSSFYCLEYFPSQMLRTGNNFQFSYEFENVPFHSSYAHSQSLDRLMNPLIDQYLYYLSRTINGSGQNQQTLKFSVAGPSNMAVQGRNYIPGPSYRQQRVSTTVTQNNNSEFAWPGASSWALNGRNSLMNPGPAMASHKEGEDRFFPLSGSLIFGKQGTGRDNVDADKVMITNEEEIKTTNPVATESYGQVATNHQSDGTLAVPFKAQAQTGWVQNQGILPGMVWQDRDVYLQGPIWAKIPHTDGNFHPSPLMGGFGMKHPPPQILIKNTPVPADPPTAFNKDKLNSFITQYSTGQVSVEIEWELQKENSKRWNPEIQYTSNYYKSNNVEFAVNTEGVYSEPRPIGTRYLTRNL

SEQ ID NO: 5 - protein, 743 aa, Artificial Sequence
  source: /note="Description of Artificial Sequence: Synthetic polypeptide"
MAADGYLPDWLEDNLSEGIREWWALKPGAPQPKANQQHQDNARGLVLPGYKYLGPGNGLDKGEPVNAADAAALEHDKAYDQQLKAGDNPYLKYNHADAEFQERLKEDTSFGGNLGRAVFQAKKRLLEPLGLVEEAAKTAPGKKRPVEQSPQEPDSSAGIGKSGAQPAKKRLNFGQTGDTESVPDPQPIGEPPAAPSGVGSLTMASGGGAPVADNNEGADGVGSSSGNWHCDSQWLGDRVITTSTRTWALPTYNNHLYKQISNSTSGGSSNDNAYFGYSTPWGYFDFNRFHCHFSPRDWQRLINNNWGFRPKRLNFKLFNIQVKEVTDNNGVKTIANNLTSTVQVFTDSDYQLPYVLGSAHEGCLPPFPADVFMIPQYGYLTLNDGSQAVGRSSFYCLEYFPSQMLRTGNNFQFSYEFENVPFHSSYAHSQSLDRLMNPLIDQYLYYLSRTINGSGQNQQTLKFSVAGPSNMAVQGRNYIPGPSYRQQRVSTTVTQNNNSEFAWPGASSWALNGRNSLMNPGPAMASHKEGEDRFFPLSGSLIFGKQGTGRDNVDADKVMITNEEEIKTTNPVATESYGQVATNHQSAQTLAVPFKAQAQTGWVQNQGILPGMVWQDRDVYLQGPIWAKIPHTDGNFHPSPLMGGFGMKHPPPQILIKNTPVPADPPTAFNKDKLNSFITQYSTGQVSVEIEWELQKENSKRWNPEIQYTSNYYKSNNVEFAVNTEGVYSEPRPIGTRYLTRNL

SEQ ID NO: 6 - DNA, 2232 bp, Artificial Sequence
  source: /note="Description of Artificial Sequence: Synthetic polynucleotide"
atggctgccgatggttatcttccagattggctcgaggacaaccttagtgaaggaattcgcgagtggtgggctttgaaacctggagcccctcaacccaaggcaaatcaacaacatcaagacaacgctcgaggtcttgtgcttccgggttacaaataccttggacccggcaacggactcgacaagggggagccggtcaacgcagcagacgcggcggccctcgagcacgacaaggcctacgaccagcagctcaaggccggagacaacccgtacctcaagtacaaccacgccgacgccgagttccaggagcggctcaaagaagatacgtcttttgggggcaacctcgggcgagcagtcttccaggccaaaaagaggcttcttgaacctcttggtctggttgaggaagcggctaagacggctcctggaaagaagaggcctgtagagcagtctcctcaggaaccggactcctccgcgggtattggcaaatcgggtgcacagcccgctaaaaagagactcaatttcggtcagactggcgacacagagtcagtcccagaccctcaaccaatcggagaacctcccgcagccccctcaggtgtgggatctcttacaatggcttcaggtggtggcgcaccagtggcagacaataacgaaggtgccgatggagtgggtagttcctcgggaaattggcattgcgattcccaatggctgggggacagagtcatcaccaccagcacccgaacctgggccctgcccacctacaacaatcacctctacaagcaaatctccaacagcacatctggaggatcttcaaatgacaacgcctacttcggctacagcaccccctgggggtattttgacttcaacagattccactgccacttctcaccacgtgactggcagcgactcatcaacaacaactggggattccggcctaagcgactcaacttcaagctcttcaacattcaggtcaaagaggttacggacaacaatggagtcaagaccatcgccaataaccttaccagcacggtccaggtcttcacggactcagactatcagctcccgtacgtgctcgggtcggctcacgagggctgcctcccgccgttcccagcggacgttttcatgattcctcagtacgggtatctgacgcttaatgatggaagccaggccgtgggtcgttcgtccttttactgcctggaatatttcccgtcgcaaatgctaagaacgggtaacaacttccagttcagctacgagtttgagaacgtacctttccatagcagctacgctcacagccaaagcctggaccgactaatgaatccactcatcgaccaatacttgtactatctctctagaactattaacggttctggacagaatcaacaaacgctaaaattcagtgtggccggacccagcaacatggctgtccagggaagaaactacatacctggacccagctaccgacaacaacgtgtctcaaccactgtgactcaaaacaacaacagcgaatttgcttggcctggagcttcttcttgggctctcaatggacgtaatagcttgatgaatcctggacctgctatggccagccacaaagaaggagaggaccgtttctttcctttgtctggatctttaatttttggcaaacaaggtaccggcagagacaacgtggatgcggacaaagtcatgataaccaacgaagaagaaattaaaactactaacccggtagcaacggagtcctatggacaagtggccacaaaccaccagagtgcccaaactttggcggtgccttttaaggcacaggcgcagaccggttgggttcaaaaccaaggaatacttccgggtatggtttggcaggacagagatgtgtacctgcaaggacccatttgggccaaaattcctcacacggacggcaactttcacccttctccgctgatgggagggtttggaatgaagcacccgcctcctcagatcctcatcaaaaacacacctgtacctgcggatcctccaacggccttcaacaaggacaagctgaactctttcatcacccagtattctactggccaagtcagcgtggagatcgagtgggagctgcagaaggaaaacagcaagcgctggaacccggagatccagtacacttccaactattacaagtctaataatgttgaatttgctgttaatactgaaggtgtatatagtgaaccccgccccattggcaccagatacctgactcgtaatctgtaa

SEQ ID NO: 7 - protein, 736 aa, Artificial Sequence
  source: /note="Description of Artificial Sequence: Synthetic polypeptide"
MAADGYLPDWLEDNLSEGIREWWALKPGAPQPKANQQHQDNARGLVLPGYKYLGPGNGLDKGEPVNAADAAALEHDKAYDQQLKAGDNPYLKYNHADAEFQERLKEDTSFGGNLGRAVFQAKKRLLEPLGLVEEAAKTAPGKKRPVEQSPQEPDSSAGIGKSGAQPAKKRLNFGQTGDTESVPDPQPIGEPPAAPSGVGSLTMASGGGAPVADNNEGADGVGSSSGNWHCDSQWLGDRVITTSTRTWALPTYNNHLYKQISNSTSGGSSNDNAYFGYSTPWGYFDFNRFHCHFSPRDWQRLINNNWGFRPKRLNFKLFNIQVKEVTDNNGVKTIANNLTSTVQVFTDSDYQLPYVLGSAHEGCLPPFPADVFMIPQYGYLTLNDGSQAVGRSSFYCLEYFPSQMLRTGNNFQFSYEFENVPFHSSYAHSQSLDRLMNPLIDQYLYYLSRTIQSSQTPRQTLKFSVAGPSNMAVQGRNYIPGPSYRQQRVSTTVTQNNNSEFAWPGASSWALNGRNSLMNPGPAMASHKEGEDRFFPLSGSLIFGKQGTGRDNVDADKVMITNEEEIKTTNPVATESYGQVATNHQSAQAQAQTGWVQNQGILPGMVWQDRDVYLQGPIWAKIPHTDGNFHPSPLMGGFGMKHPPPQILIKNTPVPADPPTAFNKDKLNSFITQYSTGQVSVEIEWELQKENSKRWNPEIQYTSNYYKSNNVEFAVNTEGVYSEPRPIGTRYLTRNL

SEQ ID NO: 8 - protein, 743 aa, Artificial Sequence
  source: /note="Description of Artificial Sequence: Synthetic polypeptide"
MAADGYLPDWLEDNLSEGIREWWALKPGAPQPKANQQHQDNARGLVLPGYKYLGPGNGLDKGEPVNAADAAALEHDKAYDQQLKAGDNPYLKYNHADAEFQERLKEDTSFGGNLGRAVFQAKKRLLEPLGLVEEAAKTAPGKKRPVEQSPQEPDSSAGIGKSGAQPAKKRLNFGQTGDTESVPDPQPIGEPPAAPSGVGSLTMASGGGAPVADNNEGADGVGSSSGNWHCDSQWLGDRVITTSTRTWALPTYNNHLYKQISNSTSGGSSNDNAYFGYSTPWGYFDFNRFHCHFSPRDWQRLINNNWGFRPKRLNFKLFNIQVKEVTDNNGVKTIANNLTSTVQVFTDSDYQLPYVLGSAHEGCLPPFPADVFMIPQYGYLTLNDGSQAVGRSSFYCLEYFPSQMLRTGNNFQFSYEFENVPFHSSYAHSQSLDRLMNPLIDQYLYYLSRTIILGTGTSQTLKFSVAGPSNMAVQGRNYIPGPSYRQQRVSTTVTQNNNSEFAWPGASSWALNGRNSLMNPGPAMASHKEGEDRFFPLSGSLIFGKQGTGRDNVDADKVMITNEEEIKTTNPVATESYGQVATNHQSAQTRTNPEAAQAQTGWVQNQGILPGMVWQDRDVYLQGPIWAKIPHTDGNFHPSPLMGGFGMKHPPPQILIKNTPVPADPPTAFNKDKLNSFITQYSTGQVSVEIEWELQKENSKRWNPEIQYTSNYYKSNNVEFAVNTEGVYSEPRPIGTRYLTRNL

SEQ ID NO: 9 - protein, 743 aa, Artificial Sequence
  source: /note="Description of Artificial Sequence: Synthetic polypeptide"
MAADGYLPDWLEDNLSEGIREWWALKPGAPQPKANQQHQDNARGLVLPGYKYLGPGNGLDKGEPVNAADAAALEHDKAYDQQLKAGDNPYLKYNHADAEFQERLKEDTSFGGNLGRAVFQAKKRLLEPLGLVEEAAKTAPGKKRPVEQSPQEPDSSAGIGKSGAQPAKKRLNFGQTGDTESVPDPQPIGEPPAAPSGVGSLTMASGGGAPVADNNEGADGVGSSSGNWHCDSQWLGDRVITTSTRTWALPTYNNHLYKQISNSTSGGSSNDNAYFGYSTPWGYFDFNRFHCHFSPRDWQRLINNNWGFRPKRLNFKLFNIQVKEVTDNNGVKTIANNLTSTVQVFTDSDYQLPYVLGSAHEGCLPPFPADVFMIPQYGYLTLNDGSQAVGRSSFYCLEYFPSQMLRTGNNFQFSYEFENVPFHSSYAHSQSLDRLMNPLIDQYLYYLSRTIILGTGTSQTLKFSVAGPSNMAVQGRNYIPGPSYRQQRVSTTVTQNNNSEFAWPGASSWALNGRNSLMNPGPAMASHKEGEDRFFPLSGSLIFGKQGTGRDNVDADKVMITNEEEIKTTNPVATESYGQVATNHQSAQNGGTSSSAQAQTGWVQNQGILPGMVWQDRDVYLQGPIWAKIPHTDGNFHPSPLMGGFGMKHPPPQILIKNTPVPADPPTAFNKDKLNSFITQYSTGQVSVEIEWELQKENSKRWNPEIQYTSNYYKSNNVEFAVNTEGVYSEPRPIGTRYLTRNL

SEQ ID NO: 10 - protein, 743 aa, Artificial Sequence
  source: /note="Description of Artificial Sequence: Synthetic polypeptide"
MAADGYLPDWLEDNLSEGIREWWALKPGAPQPKANQQHQDNARGLVLPGYKYLGPGNGLDKGEPVNAADAAALEHDKAYDQQLKAGDNPYLKYNHADAEFQERLKEDTSFGGNLGRAVFQAKKRLLEPLGLVEEAAKTAPGKKRPVEQSPQEPDSSAGIGKSGAQPAKKRLNFGQTGDTESVPDPQPIGEPPAAPSGVGSLTMASGGGAPVADNNEGADGVGSSSGNWHCDSQWLGDRVITTSTRTWALPTYNNHLYKQISNSTSGGSSNDNAYFGYSTPWGYFDFNRFHCHFSPRDWQRLINNNWGFRPKRLNFKLFNIQVKEVTDNNGVKTIANNLTSTVQVFTDSDYQLPYVLGSAHEGCLPPFPADVFMIPQYGYLTLNDGSQAVGRSSFYCLEYFPSQMLRTGNNFQFSYEFENVPFHSSYAHSQSLDRLMNPLIDQYLYYLSRTINGSGQNQQTLKFSVAGPSNMAVQGRNYIPGPSYRQQRVSTTVTQNNNSEFAWPGASSWALNGRNSLMNPGPAMASHKEGEDRFFPLSGSLIFGKQGTGRDNVDADKVMITNEEEIKTTNPVATESYGQVATNHQSAQQAVRTSLAQAQTGWVQNQGILPGMVWQDRDVYLQGPIWAKIPHTDGNFHPSPLMGGFGMKHPPPQILIKNTPVPADPPTAFNKDKLNSFITQYSTGQVSVEIEWELQKENSKRWNPEIQYTSNYYKSNNVEFAVNTEGVYSEPRPIGTRYLTRNL

SEQ ID NO: 11 - protein, 736 aa, Artificial Sequence
  source: /note="Description of Artificial Sequence: Synthetic polypeptide"
MAADGYLPDWLEDNLSEGIREWWALKPGAPQPKANQQHQDNARGLVLPGYKYLGPGNGLDKGEPVNAADAAALEHDKAYDQQLKAGDNPYLKYNHADAEFQERLKEDTSFGGNLGRAVFQAKKRLLEPLGLVEEAAKTAPGKKRPVEQSPQEPDSSAGIGKSGAQPAKKRLNFGQTGDTESVPDPQPIGEPPAAPSGVGSLTMASGGGAPVADNNEGADGVGSSSGNWHCDSQWLGDRVITTSTRTWALPTYNNHLYKQISNSTSGGSSNDNAYFGYSTPWGYFDFNRFHCHFSPRDWQRLINNNWGFRPKRLNFKLFNIQVKEVTDNNGVKTIANNLTSTVQVFTDSDYQLPYVLGSAHEGCLPPFPADVFMIPQYGYLTLNDGSQAVGRSSFYCLEYFPSQMLRTGNNFQFSYEFENVPFHSSYAHSQSLDRLMNPLIDQYLYYLSRTINGSGQNQQTLKFSVAGPSNMAVQGRNYIPGPSYRQQRVSTTVTQNNNSEFAWPGASSWALNGRNSLMNPGPAMASHKEGEDRFFPLSGSLIFGKQGTGRDNVDADKVMITNEEEIKTTNPVATESYGQVATNHQSAQAQAQTGWVQNQGILPGMVWQDRDVYLQGPIWAKIPHTDGNFHPSPLMGGFGMKHPPPQILIKNTPVPADPPTAFNKDKLNSFITQYSTGQVSVEIEWELQKENSKRWNPEIQYTSNYYKSNNVEFAVNTEGVYSEPRPIGTRYLTRNL

SEQ ID NO: 12 - DNA, 2211 bp, Artificial Sequence
  source: /note="Description of Artificial Sequence: Synthetic polynucleotide"
atggctgccgatggttatcttccagattggctcgaggacaacctctctgagggcattcgcgagtggtgggacttgaaacctggagccccgaagcccaaagccaaccagcaaaagcaggacgacggccggggtctggtgcttcctggctacaagtacctcggacccttcaacggactcgacaagggggagcccgtcaacgcggcggacgcagcggccctcgagcacgacaaggcctacgaccagcagctcaaagcgggtgacaatccgtacctgcggtataaccacgccgacgccgagtttcaggagcgtctgcaagaagatacgtcttttgggggcaacctcgggcgagcagtcttccaggccaagaagcgggttctcgaacctctcggtctggttgaggaaggcgctaagacggctcctggaaagaaacgtccggtagagcagtcgccacaagagccagactcctcctcgggcatcggcaagacaggccagcagcccgctaaaaagagactcaattttggtcagactggcgactcagagtcagtccccgatccacaacctctcggagaacctccagcaacccccgctgctgtgggacctactacaatggcttcaggcggtggcgcaccaatggcagacaataacgaaggcgccgacggagtgggtaatgcctcaggaaattggcattgcgattccacatggctgggcgacagagtcatcaccaccagcacccgcacctgggccttgcccacctacaataaccacctctacaagcaaatctccagtgcttcaacgggggccagcaacgacaaccactacttcggctacagcaccccctgggggtattttgatttcaacagattccactgccacttttcaccacgtgactggcagcgactcatcaacaacaattggggattccggcccaagagactcaacttcaaactcttcaacatccaagtcaaggaggtcacgacgaatgatggcgtcacaaccatcgctaataaccttaccagcacggttcaagtcttctcggactcggagtaccagcttccgtacgtcctcggctctgcgcaccagggctgcctccctccgttcccggcggacgtgttcatgattccgcaatacggctacctgacgctcaacaatggcagccaagccgtgggacgttcatccttttactgcctggaatatttcccttctcagatgctgagaacgggcaacaactttaccttcagctacacctttgaggaagtgcctttccacagcagctacgcgcacagccagagcctggaccggctgatgaatcctctcatcgaccaatacctgtattacctgaacagaactcaaaatcagtccggaagtgcccaaaacaaggacttgctgtttagccgtgggtctccagctggcatgtctgttcagcccaaaaactggctacctggaccctgttatcggcagcagcgcgtttctaaaacaaaaacagacaacaacaacagcaattttacctggactggtgcttcaaaatataacctcaatgggcgtgaatccatcatcaaccctggcactgctatggcctcacacaaagacgacgaagacaagttctttcccatgagcggtgtcatgatttttggaaaagagagcgccggagcttcaaacactgcattggacaatgtcatgattacagacgaagaggaaattaaagccactaaccctgtggccaccgaaagatttgggaccgtggcagtcaatttccagagcagcagcacagaccctgcgaccggagatgtgcatgctatgggagcattacctggcatggtgtggcaagatagagacgtgtacctgcagggtcccatttgggccaaaattcctcacacagatggacactttcacccgtctcctcttatgggcggctttggactcaagaacccgcctcctcagatcctcatcaaaaacacgcctgttcctgcgaatcctccggcggagttttcagctacaaagtttgcttcattcatcacccaatactccacaggacaagtgagtgtggaaattgaatgggagctgcagaaagaaaacagcaagcgctggaatcccgaagtgcagtacacatccaattatgcaaaatctgccaacgttgattttactgtggacaacaatggactttatactgagcctcgccccattggcacccgttaccttacccgtcccctgtaa

SEQ ID NO: 13 - protein, 736 aa, Adeno-associated virus 1
MAADGYLPDWLEDNLSEGIREWWDLKPGAPKPKANQQKQDDGRGLVLPGYKYLGPFNGLDKGEPVNAADAAALEHDKAYDQQLKAGDNPYLRYNHADAEFQERLQEDTSFGGNLGRAVFQAKKRVLEPLGLVEEGAKTAPGKKRPVEQSPQEPDSSSGIGKTGQQPAKKRLNFGQTGDSESVPDPQPLGEPPATPAAVGPTTMASGGGAPMADNNEGADGVGNASGNWHCDSTWLGDRVITTSTRTWALPTYNNHLYKQISSASTGASNDNHYFGYSTPWGYFDFNRFHCHFSPRDWQRLINNNWGFRPKRLNFKLFNIQVKEVTTNDGVTTIANNLTSTVQVFSDSEYQLPYVLGSAHQGCLPPFPADVFMIPQYGYLTLNNGSQAVGRSSFYCLEYFPSQMLRTGNNFTFSYTFEEVPFHSSYAHSQSLDRLMNPLIDQYLYYLNRTQNQSGSAQNKDLLFSRGSPAGMSVQPKNWLPGPCYRQQRVSKTKTDNNNSNFTWTGASKYNLNGRESIINPGTAMASHKDDEDKFFPMSGVMIFGKESAGASNTALDNVMITDEEEIKATNPVATERFGTVAVNFQSSSTDPATGDVHAMGALPGMVWQDRDVYLQGPIWAKIPHTDGHFHPSPLMGGFGLKNPPPQILIKNTPVPANPPAEFSATKFASFITQYSTGQVSVEIEWELQKENSKRWNPEVQYTSNYAKSANVDFTVDNNGLYTEPRPIGTRYLTRPL

SEQ ID NO: 14 - DNA, 4718 bp, Adeno-associated virus 1
ttgcccactccctctctgcgcgctcgctcgctcggtggggcctgcggaccaaaggtccgcagacggcagagctctgctctgccggccccaccgagcgagcgagcgcgcagagagggagtgggcaactccatcactaggggtaatcgcgaagcgcctcccacgctgccgcgtcagcgctgacgtaaattacgtcataggggagtggtcctgtattagctgtcacgtgagtgcttttgcgacattttgcgacaccacgtggccatttagggtatatatggccgagtgagcgagcaggatctccattttgaccgcgaaatttgaacgagcagcagccatgccgggcttctacgagatcgtgatcaaggtgccgagcgacctggacgagcacctgccgggcatttctgactcgtttgtgagctgggtggccgagaaggaatgggagctgcccccggattctgacatggatctgaatctgattgagcaggcacccctgaccgtggccgagaagctgcagcgcgacttcctggtccaatggcgccgcgtgagtaaggccccggaggccctcttctttgttcagttcgagaagggcgagtcctacttccacctccatattctggtggagaccacgggggtcaaatccatggtgctgggccgcttcctgagtcagattagggacaagctggtgcagaccatctaccgcgggatcgagccgaccctgcccaactggttcgcggtgaccaagacgcgtaatggcgccggaggggggaacaaggtggtggacgagtgctacatccccaactacctcctgcccaagactcagcccgagctgcagtgggcgtggactaacatggaggagtatataagcgcctgtttgaacctggccgagcgcaaacggctcgtggcgcagcacctgacccacgtcagccagacccaggagcagaacaaggagaatctgaaccccaattctgacgcgcctgtcatccggtcaaaaacctccgcgcgctacatggagctggtcgggtggctggtggaccggggcatcacctccgagaagcagtggatccaggaggaccaggcctcgtacatctccttcaacgccgcttccaactcgcggtcccagatcaaggccgctctggacaatgccggcaagatcatggcgctgaccaaatccgcgcccgactacctggtaggccccgctccgcccgcggacattaaaaccaaccgcatctaccgcatcctggagctgaacggctacgaacctgcctacgccggctccgtctttctcggctgggcccagaaaaggttcgggaagcgcaacaccatctggctgtttgggccggccaccacgggcaagaccaacatcgcggaagccatcgcccacgccgtgcccttctacggctgcgtcaactggaccaatgagaactttcccttcaatgattgcgtcgacaagatggtgatctggtgggaggagggcaagatgacggccaaggtcgtggagtccgccaaggccattctcggcggcagcaaggtgcgcgtggaccaaaagtgcaagtcgtccgcccagatcgaccccacccccgtgatcgtcacctccaacaccaacatgtgcgccgtgattgacgggaacagcaccaccttcgagcaccagcagccgttgcaggaccggatgttcaaatttgaactcacccgccgtctggagcatgactttggcaaggtgacaaagcaggaagtcaaagagttcttccgctgggcgcaggatcacgtgaccgaggtggcgcatgagttctacgtcagaaagggtggagccaacaaaagacccgcccccgatgacgcggataaaagcgagcccaagcgggcctgcccctcagtcgcggatccatcgacgtcagacgcggaaggagctccggtggactttgccgacaggtaccaaaacaaatgttctcgtcacgcgggcatgcttcagatgctgtttccctgcaagacatgcgagagaatgaatcagaatttcaacatttgcttcacgcacgggacgagagactgttcagagtgcttccccggcgtgtcagaatctcaaccggtcgtcagaaagaggacgtatcggaaactctgtgccattcatcatctgctggggcgggctcccgagattgcttgctcggcctgcgatctggtcaacgtggacctggatgactgtgtttctgagcaataaatgacttaaaccaggtatggctgccgatggttatcttccagattggctcgaggacaacctctctgagggcattcgcgagtggtgggacttgaaacctggagccccgaagcccaaagccaaccagcaaaagcaggacgacggccggggtctggtgcttcctggctacaagtacctcggacccttcaacggactcgacaagggggagcccgtcaacgcggcggacgcagcggccctcgagcacgacaaggcctacgaccagcagctcaaagcgggtgacaatccgtacctgcggtataaccacgccgacgccgagtttcaggagcgtctgcaagaagatacgtcttttgggggcaacctcgggcgagcagtcttccaggccaagaagcgggttctcgaacctctcggtctggttgaggaaggcgctaagacggctcctggaaagaaacgtccggtagagcagtcgccacaagagccagactcctcctcgggcatcggcaagacaggccagcagcccgctaaaaagagactcaattttggtcagactggcgactcagagtcagtccccgatccacaacctctcggagaacctccagcaacccccgctgctgtgggacctactacaatggcttcaggcggtggcgcaccaatggcagacaataacgaaggcgccgacggagtgggtaatgcctcaggaaattggcattgcgattccacatggctgggcgacagagtcatcaccaccagcacccgcacctgggccttgcccacctacaataaccacctctacaagcaaatctccagtgcttcaacgggggccagcaacgacaaccactacttcggctacagcaccccctgggggtattttgatttcaacagattccactgccacttttcaccacgtgactggcagcgactcatcaacaacaattggggattccggcccaagagactcaacttcaaactcttcaacatccaagtcaaggaggtcacgacgaatgatggcgtcacaaccatcgctaataaccttaccagcacggttcaagtcttctcggactcggagtaccagcttccgtacgtcctcggctctgcgcaccagggctgcctccctccgttcccggcggacgtgttcatgattccgcaatacggctacctgacgctcaacaatggcagccaagccgtgggacgttcatccttttactgcctggaatatttcccttctcagatgctgagaacgggcaacaactttaccttcagctacacctttgaggaagtgcctttccacagcagctacgcgcacagccagagcctggaccggctgatgaatcctctcatcgaccaatacctgtattacctgaacagaactcaaaatcagtccggaagtgcccaaaacaaggacttgctgtttagccgtgggtctccagctggcatgtctgttcagcccaaaaactggctacctggaccctgttatcggcagcagcgcgtttctaaaacaaaaacagacaacaacaacagcaattttacctggactggtgcttcaaaatataacctcaatgggcgtgaatccatcatcaaccctggcactgctatggcctcacacaaagacgacgaagacaagttctttcccatgagcggtgtcatgatttttggaaaagagagcgccggagcttcaaacactgcattggacaatgtcatgattacagacgaagaggaaattaaagccactaaccctgtggccaccgaaagatttgggaccgtggcagtcaatttccagagcagcagcacagaccctgcgaccggagatgtgcatgctatgggagcattacctggcatggtgtggcaagatagagacgtgtacctgcagggtcccatttgggccaaaattcctcacacagatggacactttcacccgtctcctcttatgggcggctttggactcaagaacccgcctcctcagatcctcatcaaaaacacgcctgttcctgcgaatcctccggcggagttttcagctacaaagtttgcttcattcatcacccaatactccacaggacaagtgagtgtggaaattgaatgggagctgcagaaagaaaacagcaagcgctggaatcccgaagtgcagtacacatccaattatgcaaaatctgccaacgttgattttactgtggacaacaatggactttatactgagcctcgccccattggcacccgttaccttacccgtcccctgtaattacgtgttaatcaataaaccggttgattcgtttcagttgaactttggtctcctgtccttcttatcttatcggttaccatggttatagcttacacattaactgcttggttgcgcttcgcgataaaagacttacgtcatcgggttacccctagtgatggagttgcccactccctctctgcgcgctcgctcgctcggtggggcctgcggaccaaaggtccgcagacggcagagctctgctctgccggccccaccgagcgagcgagcgcgcagagagggagtgggcaa

SEQ ID NO: 15 - DNA, 3131 bp, Artificial Sequence
  source: /note="Description of Artificial Sequence: Synthetic polynucleotide"
gcggccgcgaattcgcccttggctgcgtcaactggaccaatgagaactttcccttcaatgattgcgtcgacaagatggtgatctggtgggaggagggcaagatgacggccaaggtcgtggagtccgccaaggccattctcggcggcagcaaggtgcgcgtggaccaaaagtgcaagtcgtccgcccagatcgaccccacccccgtgatcgtcacctccaacaccaacatgtgcgccgtgattgacgggaacagcaccaccttcgagcaccagcagcctctccaggaccggatgtttaagttcgaactcacccgccgtctggagcacgactttggcaaggtgacaaagcaggaagtcaaagagttcttccgctgggccagtgatcacgtgaccgaggtggcgcatgagttttacgtcagaaagggcggagccagcaaaagacccgcccccgatgacgcggataaaagcgagcccaagcgggcctgcccctcagtcgcggatccatcgacgtcagacgcggaaggagctccggtggactttgccgacaggtaccaaaacaaatgttctcgtcacgcgggcatgcttcagatgctgtttccctgcaaaacgtgcgagagaatgaatcggaatttcaacatttgcttcacacacggggtcagagactgctcagagtgtttccccggcgtgtcagaatctcaaccggtcgtcagaaagaggacgtatcggaaactccgtgcgattcatcatctgctggggcgggctcccgagattgcttgctcggcctgcgatctggtcaacgtggacctggatgactgtgtttctgagcaataaatgacttaaaccaggtatggctgccgatggttatcttccagattggctcgaggacaacctctctgagggcattcgcgagtggtgggcgctgaaacctggagccccgaagcccaaagccaaccagcaaaagcaggacgacggccggggtctggtgcttcctggctacaagtacctcggacccttcaacggactcgacaagggggagcccgtcaacgcggcggacgcagcggccctcgagcacgacaaggcttacgaccagcagctgcaggcgggtgacaatccgtacctgcggtataaccacgccgacgccgagtttcaggagcgtctgcaagaagatacgtcttttgggggcaacctcgggcgagcagtcttccaggccaagaagcgggttctcgaacctctcggtctggttgaggaaggcgctaagacggctcctggaaagaagagaccggtagagccatcaccccagcgttctccagactcctctacgggcatcggcaagaaaggccaacagcccgccagaaaaagactcaattttggtcagactggcgactcagagtcagttccagaccctcaacctctcggagaacctccagcagcgccctctggtgtgggacctaatacaatggctgcaggcggtggcgcaccaatggcagacaataacgaaggcgccgacggagtgggtagttcctcgggaaattggcattgcgattccacatggctgggcgacagagtcatcaccaccagcacccgaacctgggccctgcccacctacaacaaccacctctacaagcaaatctccaacgggacatcgggaggagccaccaacgacaacacctacttcggctacagcaccccctgggggtattttgactttaacagattccactgccacctttcaccacgtgactggcagcgactcatcaacaacaactggggattccgacccaagagactcagcttcaagctcttcaacatccaggtcaaggaggtcacgcagaatgaaggcaccaagaccatcgccaataacctcaccagcaccatccaggtgtttacggactcggagtaccagctgccgtacgttctcggctctgtccaccagggctgcctgcctccgttcccggcggacgtgttcatgattccccagtacggctacctaacactcaacaacggtagtcaggccgtgggacgctcctccttctactgcctggaatactttccttcgcagatgctgagaaccggcaacaacttccagtttacttacaccttcgaggacgtgcctttccacagcagctacgcccacagctagagcttggaccggctgatgaatcctctgattgaccagtacctgtactacttgtctcggactcaaacaacaggaggcacggcaaatacgcagactctgggcttcagccaaggtgggcctaatacaatggccaatcaggcaaagaactggctgccaggaccctgttaccgccaacaacgcgtctcaacgacaaccgggcaaaacaacaatagcaactttgcctggactgctgggaccaaataccatctgaatggaagaaattcattggctaatcctggcatcgctatggcaacacacaaagacgacgaggagcgtttttttcccagtaacgggatcctgatttttggcaaacaaaatgctgccagagacaatgcggattacagcgatgtcatgctcaccagcgaggaagaaatcaaaaccactaaccctgtggctacagaggaatacggtatcgtggcagataacttgcagcagcaaaacacggctcctcaaattggaactgtcaacagccagggggccttacccggtatggtctggcagaaccgggacgtgtacctgcagggtcccatctgggccaagattcctcacacggacggcaacttccacccgtctccgctgatgggcggctttggcctgaaacatcctccgcctcagatcctgatcaagaacacgcctgtacctgcggatcctccgaccaccttcaaccagtcaaagctgaactctttcatcacgcaatacagcaccggacaggtcagcgtggaaattgaatgggagctgcagaaggaaaacagcaagcgctggaaccccgagatccagtacacctccaactactacaaatctataagtgtggactttgctgttaatacagaaggcgtgtactctgaaccccgccccattggcacccgttacctcacccgtaatctgtaattgcctgttaatcaataaaccggttgattcgtttcagttgaactttggtctctgcgaagggcgaattc

SEQ ID NO: 16 - DNA, 255 bp, Adeno-associated virus 10
ggtaattcctccggaaattggcattgcgattccacatggctgggcgacagagtcatcaccaccagcacccgaacctgggtcctgcccacctacaacaaccacatctacaagcaaatctccagcgagacaggagccaccaacgacaaccactacttcggctacagcaccccctgggggtattttgactttaacagattccactgccacttttcaccacgtgactggcagcgactcatcaacaacaactggggattc

SEQ ID NO: 17 - protein, 738 aa, Adeno-associated virus 10
MAADGYLPDWLEDNLSEGIREWWDLKPGAPKPKANQQKQDDGRGLVLPGYKYLGPFNGLDKGEPVNAADAAALEHDKAYDQQLKAGDNPYLRYNHADAEFQERLQEDTSFGGNLGRAVFQAKKRVLEPLGLVEEAAKTAPGKKRPVEPSPQRSPDSSTGIGKKGQQPAKKRLNFGQTGESESVPDPQPIGEPPAGPSGLGSGTMAAGGGAPMADNNEGADGVGSSSGNWHCDSTWLGDRVITTSTRTWALPTYNNHLYKQISNGTSGGSTNDNTYFGYSTPWGYFDFNRFHCHFSPRDWQRLINNNWGFRPKRLSFKLFNIQVKEVTQNEGTKTIANNLTSTIQVFTDSEYQLPYVLGSAHQGCLPPFPADVFMIPQYGYLTLNNGSQAVGRSSFYCLEYFPSQMLRTGNNFEFSYTFEDVPFHSSYAHSQSLDRLMNPLIDQYLYYLSRTQSTGGTQGTQQLLFSQAGPANMSAQAKNWLPGPCYRQQRVSTTLSQNNNSNFAWTGATKYHLNGRDSLVNPGVAMATHKDDEERFFPSSGVLMFGKQGAGRDNVDYSSVMLTSEEEIKTTNPVATEQYGVVADNLQQANTGPIVGNVNSQGALPGMVWQNRDVYLQGPIWAKIPHTDGNFHPSPLMGGFGLKHPPPQILIKNTPVPADPPTTFSQAKLASFITQYSTGQVSVEIEWELQKENSKRWNPEIQYTSNYYKSTNVDFAVNTEGTYSEPRPIGTRYLTRNL

SEQ ID NO: 18 - protein, 738 aa, Adeno-associated virus 10
MAADGYLPDWLEDNLSEGIREWWDLKPGAPKPKANQQKQDDGRGLVLPGYKYLGPFNGLDKGEPVNAADAAALEHDKAYDQQLKAGDNPYLRYNHADAEFQERLQEDTSFGGNLGRAVFQAKKRVLEPLGLVEEGAKTAPGKKRPVEPSPQRSPDSSTGIGKKGQQPAKKRLNFGQTGDSESVPDPQPIGEPPAGPSGLGSGTMAAGGGAPMADNNEGADGVGSSSGNWHCDSTWLGDRVITTSTRTWALPTYNNHLYKQISNGTSGGSTNDNTYFGYSTPWGYFDFNRFHCHFSPRDWQRLINNNWGFRPKRLNFKLFNIQVKEVTQNEGTKTIANNLTSTIQVFTDSEYQLPYVLGSAHQGCLPPFPADVFMIPQYGYLTLNNGSQAVGRSSFYCLEYFPSQMLRTGNNFEFSYQFEDVPFHSSYAHSQSLDRLMNPLIDQYLYYLSRTQSTGGTAGTQQLLFSQAGPNNMSAQAKNWLPGPCYRQQRVSTTLSQNNNSNFAWTGATKYHLNGRDSLVNPGVAMATHKDDEERFFPSSGVLMFGKQGAGKDNVDYSSVMLTSEEEIKTTNPVATEQYGVVADNLQQQNAAPIVGAVNSQGALPGMVWQNRDVYLQGPIWAKIPHTDGNFHPSPLMGGFGLKHPPPQILIKNTPVPADPPTTFSQAKLASFITQYSTGQVSVEIEWELQKENSKRWNPEIQYTSNYYKSTNVDFAVNTDGTYSEPRPIGTRYLTRNL

SEQ ID NO: 19 - DNA, 258 bp, Adeno-associated virus 11
ggtaattcctccggaaattggcattgcgattccacatggctgggcgacagagtcatcaccaccagcacccgaacctgggccctgccaacctacaacaaccacctctacaaacaaatctccagcgcttcaacgggggccagcaacgacaaccactactttggctacagcaccccctgggggtattttgactttaacagattccactgccacttctcaccacgtgactggcagcgactcatcaacaacaactggggattc

SEQ ID NO: 20 - DNA, 255 bp, Adeno-associated virus 12
ggtaattcctccggaaattggcattgcgattccacatggctgggcgaccgagtcattaccaccagcacccggacttgggccctgcccacctacaacaaccacctctacaagcaaatctccagccaatcgggtgccaccaacgacaaccactacttcggctacagcaccccttgggggtattttgatttcaacagattccactgccatttctcaccacgtgactggcagcgactcatcaacaacaactggggattc

SEQ ID NO: 21 - DNA, 2208 bp, Adeno-associated virus 2
atggctgccgatggttatcttccagattggctcgaggacactctctctgaaggaataagacagtggtggaagctcaaacctggcccaccaccaccaaagcccgcagagcggcataaggacgacagcaggggtcttgtgcttcctgggtacaagtacctcggacccttcaacggactcgacaagggagagccggtcaacgaggcagacgccgcggccctcgagcacgacaaagcctacgaccggcagctcgacagcggagacaacccgtacctcaagtacaaccacgccgacgcggagtttcaggagcgccttaaagaagatacgtcttttgggggcaacctcggacgagcagtcttccaggcgaaaaagagggttcttgaacctctgggcctggttgaggaacctgttaagacggctccgggaaaaaagaggccggtagagcactctcctgtggagccagactcctcctcgggaaccggaaaggcgggccagcagcctgcaagaaaaagattgaattttggtcagactggagacgcagactcagtacctgacccccagcctctcggacagccaccagcagccccctctggtctgggaactaatacgatggctacaggcagtggcgcaccaatggcagacaataacgagggcgccgacggagtgggtaattcctcgggaaattggcattgcgattccacatggatgggcgacagagtcatcaccaccagcacccgaacctgggccctgcccacctacaacaaccacctctacaaacaaatttccagccaatcaggagcctcgaacgacaatcactactttggctacagcaccccttgggggtattttgacttcaacagattccactgccacttttcaccacgtgactggcaaagactcatcaacaacaactggggattccgacccaagagactcaacttcaagctctttaacattcaagtcaaagaggtcacgcagaatgacggtacgacgacgattgccaataaccttaccagcacggttcaggtgtttactgactcggagtaccagctcccgtacgtcctcggctcggcgcatcaaggatgcctcccgccgttcccagcagacgtcttcatggtgccacagtatggatacctcaccctgaacaacgggagtcaggcagtaggacgctcttcattttactgcctggagtactttccttctcagatgctgcgtaccggaaacaactttaccttcagctacacttttgaggacgttcctttccacagcagctacgctcacagccagagtctggaccgtctcatgaatcctctcatcgaccagtacctgtattacttgagcagaacaaacactccaagtggaaccaccacgcagtcaaggcttcagttttctcaggccggagcgagtgacattcgggaccagtctaggaactggcttcctggaccctgttaccgccagcagcgagtatcaaagacatctgcggataacaacaacagtgaatactcgtggactggagctaccaagtaccacctcaatggcagagactctctggtgaatccgggcccggccatggcaagccacaaggacgatgaagaaaagttttttcctcagagcggggttctcatctttgggaagcaaggctcagagaaaacaaatgtggacattgaaaaggtcatgattacagacgaagaggaaatcaggacaaccaatcccgtggctacggagcagtatggttctgtatctaccaacctccagagaggcaacagacaagcagctaccgcagatgtcaacacacaaggcgttcttccaggcatggtctggcaggacagagatgtgtaccttcaggggcccatctgggcaaagattccacacacggacggacattttcacccctctcccctcatgggtggattcggacttaaacaccctcctccacagattctcatcaagaacaccccggtacctgcgaatccttcgaccaccttcagtgcggcaaagtttgcttccttcatcacacagtactccacgggacaggtcagcgtggagatcgagtgggagctgcagaaggaaaacagcaaacgctggaatcccgaaattcagtacacttccaactacaacaagtctgttaatgtggactttactgtggacactaatggcgtgtattcagagcctcgccccattggcaccagatacctgactcgtaatctgtaa

SEQ ID NO: 22 - protein, 735 aa, Adeno-associated virus 2 [sequence omitted]

SEQ ID NO: 23 - protein, 621 aa, Adeno-associated virus 2
MPGFYEIVIKVPSDLDGHLPGISDSFVNWVAEKEWELPPDSDMDLNLIEQAPLTVAEKLQRDFLTEWRRVSKAPEALFFVQFEKGESYFHMHVLVETTGVKSMVLGRFLSQIREKLIQRIYRGIEPTLPNWFAVTKTRNGAGGGNKVVDECYIPNYLLPKTQPELQWAWTNMEQYLSACLNLTERKRLVAQHLTHVSQTQEQNKENQNPNSDAPVIRSKTSARYMELVGWLVDKGITSEKQWIQEDQASYISFNAASNSRSQIKAALDNAGKIMSLTKTAPDYLVGQQPVEDISSNRIYKILELNGYDPQYAASVFLGWATKKFGKRNTIWLFGPATTGKTNIAEAIAHTVPFYGCVNWTNENFPFNDCVDKMVIWWEEGKMTAKVVESAKAILGGSKVRVDQKCKSSAQIDPTPVIVTSNTNMCAVIDGNSTTFEHQQPLQDRMFKFELTRRLDHDFGKVTKQEVKDFFRWAKDHVVEVEHEFYVKKGGAKKRPAPSDADISEPKRVRESVAQPSTSDAEASINYADRYQNKCSRHVGMNLMLFPCRQCERMNQNSNICFTHGQKDCLECFPVSESQPVSVVKKAYQKLCYIHHIMGKVPDACTACDLVNVDLDDCIFEQ

SEQ ID NO: 24 - DNA, 4675 bp, Adeno-associated virus 2
ttggccactccctctctgcgcgctcgctcgctcactgaggccgggcgaccaaaggtcgcccgacgcccgggctttgcccgggcggcctcagtgagcgagcgagcgcgcagagagggagtggccaactccatcactaggggttcctggaggggtggagtcgtgacgtgaattacgtcatagggttagggaggtcctgtattagaggtcacgtgagtgttttgcgacattttgcgacaccatgtggtcacgctgggtatttaagcccgagtgagcacgcagggtctccattttgaagcgggaggtttgaacgcgcagccgccatgccggggttttacgagattgtgattaaggtccccagcgaccttgacgggcatctgcccggcatttctgacagctttgtgaactgggtggccgagaaggaatgggagttgccgccagattctgacatggatctgaatctgattgagcaggcacccctgaccgtggccgagaagctgcagcgcgactttctgacggaatggcgccgtgtgagtaaggccccggaggcccttttctttgtgcaatttgagaagggagagagctacttccacatgcacgtgctcgtggaaaccaccggggtgaaatccatggttttgggacgtttcctgagtcagattcgcgaaaaactgattcagagaatttaccgcgggatcgagccgactttgccaaactggttcgcggtcacaaagaccagaaatggcgccggaggcgggaacaaggtggtggatgagtgctacatccccaattacttgctccccaaaacccagcctgagctccagtgggcgtggactaatatggaacagtatttaagcgcctgtttgaatctcacggagcgtaaacggttggtggcgcagcatctgacgcacgtgtcgcagacgcaggagcagaacaaagagaatcagaatcccaattctgatgcgccggtgatcagatcaaaaacttcagccaggtacatggagctggtcgggtggctcgtggacaaggggattacctcggagaagcagtggatccaggaggaccaggcctcatacatctccttcaatgcggcctccaactcgcggtcccaaatcaaggctgccttggacaatgcgggaaagattatgagcctgactaaaaccgcccccgactacctggtgggccagcagcccgtggaggacatttccagcaatcggatttataaaattttggaactaaacgggtacgatccccaatatgcggcttccgtctttctgggatgggccacgaaaaagttcggcaagaggaacaccatctggctgtttgggcctgcaactaccgggaagaccaacatcgcggaggccatagcccacactgtgcccttctacgggtgcgtaaactggaccaatgagaactttcccttcaacgactgtgtcgacaagatggtgatctggtgggaggaggggaagatgaccgccaaggtcgtggagtcggccaaagccattctcggaggaagcaaggtgcgcgtggaccagaaatgcaagtcctcggcccagatagacccgactcccgtgatcgtcacctccaacaccaacatgtgcgccgtgattgacgggaactcaacgaccttcgaacaccagcagccgttgcaagaccggatgttcaaatttgaactcacccgccgtctggatcatgactttgggaaggtcaccaagcaggaagtcaaagactttttccggtgggcaaaggatcacgtggttgaggtggagcatgaattctacgtcaaaaagggtggagccaagaaaagacccgcccccagtgacgcagatataagtgagcccaaacgggtgcgcgagtcagttgcgcagccatcgacgtcagacgcggaagcttcgatcaactacgcagacaggtaccaaaacaaatgttctcgtcacgtgggcatgaatctgatgctgtttccctgcagacaatgcgagagaatgaatcagaattcaaatatctgcttcactcacggacagaaagactgtttagagtgctttcccgtgtcagaatctcaacccgtttctgtcgtcaaaaaggcgtatcagaaactgtgctacattcatcatatcatgggaaaggtgccagacgcttgcactgcctgcgatctggtcaatgtggatttggatgactgcatctttgaacaataaatgatttaaatcaggtatggctgccgatggttatcttccagattggctcgaggacactctctctgaaggaataagacagtggtggaagctcaaacctggcccaccaccaccaaagcccgcagagcggcataaggacgacagcaggggtcttgtgcttcctgggtacaagtacctcggacccttcaacggactcgacaagggagagccggtcaacgaggcagacgccgcggccctcgagcacgtacaaagcctacgaccggcagctcgacagcggagacaacccgtacctcaagtacaaccacgccgacgcggagtttcaggagcgccttaaagaagatacgtcttttgggggcaacctcggacgagcagtcttccaggcgaaaaagagggttcttgaacctctgggcctggttgaggaacctgttaagacggctccgggaaaaaagaggccggtagagcactctcctgtggagccagactcctcctcgggaaccggaaaggcgggccagcagcctgcaagaaaaagattgaattttggtcagactggagacgcagactcagtacctgacccccagcctctcggacagccaccagcagccccctctggtctgggaactaatacgatggctacaggcagtggcgcaccaatggcagacaataacgagggcgccgacggagtgggtaattcctccggaaattggcattgcgattccacatggatgggcgacagagtcatcaccaccagcacccgaacctgggccctgcccacctacaacaaccacctctacaaacaaatttccagccaatcaggagcctcgaacgacaatcactactttggctacagcaccccttgggggtattttgacttcaacagattccactgccacttttcaccacgtgactggcaaagactcatcaacaacaactggggattccgacccaagagactcaacttcaagctctttaacattcaagtcaaagaggtcacgcagaatgacggtacgacgacgattgccaataaccttaccagcacggttcaggtgtttactgactcggagtaccagctcccgtacgtcctcggctcggcgcatcaaggatgcctcccgccgttcccagcagacgtcttcatggtgccacagtatggatacctcaccctgaacaacgggagtcaggcagtaggacgctcttcattttactgcctggagtactttccttctcagatgctgcgtaccggaaacaactttaccttcagctacacttttgaggacgttcctttccacagcagctacgctcacagccagagtctggaccgtctcatgaatcctctcatcgaccagtacctgtattacttgagcagaacaaacactccaagtggaaccaccacgcagtcaaggcttcagttttctcaggccggagcgagtgacattcgggaccagtctaggaactggcttcctggaccctgttaccgccagcagcgagtatcaaagacatctgcggataacaacaacagtgaatactcgtggactggagctaccaagtaccacctcaatggcagagactctctggtgaatccggccatggcaagccacaaggacgatgaagaaaagttttttcctcagagcggggttctcatctttgggaagcaaggctcagagaaaacaaatgtgaacattgaaaaggtcatgattacagacgaagaggaaatcggaacaaccaatcccgtggctacggagcagtatggttctgtatctaccaacctccagagaggcaacagacaagcagctaccgcagatgtcaacacacaaggcgttcttccaggcatggtctggcaggacagagatgtgtaccttcaggggcccatctgggcaaagattccacacacggacggacattttcacccctctcccctcatgggtggattcggacttaaacaccctcctccacagattctcatcaagaacaccccggtacctgcgaatccttcgaccaccttcagtgcggcaaagtttgcttccttcatcacacagtactccacgggacacggtcagcgtggagatcgagtgggagctgcagaaggaaaacagcaaacgctggaatcccgaaattcagtacacttccaactacaacaagtctgttaatcgtggacttaccgtggatactaatggcgtgtattcagagcctcgccccattggcaccagatacctgactcgtaatctgtaattgcttgttaatcaataaaccgtttaattcgtttcagttgaactttggtctctgcgtatttctttcttatctagtttccatggctacgtagataagtagcatggcgggttaatcattaactacaaggaacccctagtgatggagttggccactccctctctgcgcgctcgctcgctcactgaggccgggcgaccaaaggtcgcccgacgcccgggctttgcccgggcggcctcagtgagcgagcgagcgcgcagagagggagtggccaa

SEQ ID NO: 25 - DNA, 4679 bp, Adeno-associated virus 2
ttggccactccctctctgcgcgctcgctcgctcactgaggccgggcgaccaaaggtcgcccgacgcccgggctttgcccgggcggcctcagtgagcgagcgagcgcgcagagagggagtggccaactccatcactaggggttcctggaggggtggagtcgtgacgtgaattacgtcatagggttagggaggtcctgtattagaggtcacgtgagtgttttgcgacattttgcgacaccatgtggtcacgctgggtatttaagcccgagtgagcacgcagggtctccattttgaagcgggaggtttgaacgcgcagccgccatgccggggttttacgagattgtgattaaggtccccagcgaccttgacgggcatctgcccggcatttctgacagctttgtgaactgggtggccgagaaggaatgggagttgccgccagattctgacatggatctgaatctgattgagcaggcacccctgaccgtggccgagaagctgcagcgcgactttctgacggaatggcgccgtgtgagtaaggccccggaggcccttttctttgtgcaatttgagaagggagagagctacttccacatgcacgtgctcgtggaaaccaccggggtgaaatccatggttttgggacgtttcctgagtcagattcgcgaaaaactgattcagagaatttaccgcgggatcgagccgactttgccaaactggttcgcggtcacaaagaccagaaatggcgccggaggcgggaacaaggtggtggatgagtgctacatccccaattacttgctccccaaaacccagcctgagctccagtgggcgtggactaatatggaacagtatttaagcgcctgtttgaatctcacggagcgtaaacggttggtggcgcagcatctgacgcacgtgtcgcagacgcaggagcagaacaaagagaatcagaatcccaattctgatgcgccggtgatcagatcaaaaacttcagccaggtacatggagctggtcgggtggctcgtggacaaggggattacctcggagaagcagtggatccaggaggaccaggcctcatacatctccttcaatgcggcctccaactcgcggtcccaaatcaaggctgccttggacaatgcgggaaagattatgagcctgactaaaaccgcccccgactacctggtgggccagcagcccgtggaggacatttccagcaatcggatttataaaattttggaactaaacgggtacgatccccaatatgcggcttccgtctttctgggatgggccacgaaaaagttcggcaagaggaacaccatctggctgtttgggcctgcaactaccgggaagaccaacatcgcggaggccatagcccacactgtgcccttctacgggtgcgtaaactggaccaatgagaactttcccttcaacgactgtgtcgacaagatggtgatctggtgggaggaggggaagatgaccgccaaggtcgtggagtcggccaaagccattctcggaggaagcaaggtgcgcgtggaccagaaatgcaagtcctcggcccagatagacccgactcccgtgatcgtcacctccaacaccaacatgtgcgccgtgattgacgggaactcaacgaccttcgaacaccagcagccgttgcaagaccggatgttcaaatttgaactcacccgccgtctggatcatgactttgggaaggtcaccaagcaggaagtcaaagactttttccggtgggcaaaggatcacgtggttgaggtggagcatgaattctacgtcaaaaagggtggagccaagaaaagacccgcccccagtgacgcagatataagtgagcccaaacgggtgcgcgagtcagttgcgcagccatcgacgtcagacgcggaagcttcgatcaactacgcagacaggtaccaaaacaaatgttctcgtcacgtgggcatgaatctgatgctgtttccctgcagacaatgcgagagaatgaatcagaattcaaatatctgcttcactcacggacagaaagactgtttagagtgctttcccgtgtcagaatctcaacccgtttctgtcgtcaaaaaggcgtatcagaaactgtgctacattcatcatatcatgggaaaggtgccagacgcttgcactgcctgcgatctggtcaatgtggatttggatgactgcatctttgaacaataaatgatttaaatcaggtatggctgccgatggttatcttccagattggctcgaggacactctctctgaaggaataagacagtggtggaagctcaaacctggcccaccaccaccaaagcccgcagagcggcataaggacgacagcaggggtcttgtgcttcctgggtacaagtacctcggacccttcaacggactcgacaagggagagccggtcaacgaggcagacgccgcggccctcgagcacgacaaagcctacgaccggcagctcgacagcggagacaacccgtacctcaagtacaaccacgccgacgcggagtttcaggagcgccttaaagaagatacgtcttttgggggcaacctcggacgagcagtcttccaggcgaaaaagagggttcttgaacctctgggcctggttgaggaacctgttaagacggctccgggaaaaaagaggccggtagagcactctcctgtggagccagactcctcctcgggaaccggaaaggcgggccagcagcctgcaagaaaaagattgaattttggtcagactggagacgcagactcagtacctgacccccagcctctcggacagccaccagcagccccctctggtctgggaactaatacgatggctacaggcagtggcgcaccaatggcagacaataacgagggcgccgacggagtgggtaattcctccggaaattggcattgcgattccacatggatgggcgacagagtcatcaccaccagcacccgaacctgggccctgcccacctacaacaaccacctctacaaacaaatttccagccaatcaggagcctcgaacgacaatcactactttggctacagcaccccttgggggtattttgacttcaacagattccactgccacttttcaccacgtgactggcaaagactcatcaacaacaactggggattccgacccaagagactcaacttcaagctctttaacattcaagtcaaagaggtcacgcagaatgacggtacgacgacgattgccaataaccttaccagcacggttcaggtgtttactgactcggagtaccagctcccgtacgtcctcggctcggcgcatcaaggatgcctcccgccgttcccagcagacgtcttcatggtgccacagtatggatacctcaccctgaacaacgggagtcaggcagtaggacgctcttcattttactgcctggagtactttccttctcagatgctgcgtaccggaaacaactttaccttcagctacacttttgaggacgttcctttccacagcagctacgctcacagccagagtctggaccgtctcatgaatcctctcatcgaccagtacctgtattacttgagcagaacaaacactccaagtggaaccaccacgcagtcaaggcttcagttttctcaggccggagcgagtgacattcgggaccagtctaggaactggcttcctggaccctgttaccgccagcagcgagtatcaaagacatctgcggataacaacaacagtgaatactcgtggactggagctaccaagtaccacctcaatggcagagactctctggtgaatccgggcccggccatggcaagccacaaggacgatgaagaaaagttttttcctcagagcggggttctcatctttgggaagcaaggctcagagaaaacaaatgtggacattgaaaaggtcatgattacagacgaagaggaaatcaggacaaccaatcccgtggctacggagcagtatggttctgtatctaccaacctccagagaggcaacagacaagcagctaccgcagatgtcaacacacaaggcgttcttccaggcatggtctggcaggacagagatgtgtaccttcaggggcccatctgggcaaagattccacacacggacggacattttcacccctctcccctcatgggtggattcggacttaaacaccctcctccacagattctcatcaagaacaccccggtacctgcgaatccttcgaccaccttcagtgcggcaaagtttgcttccttcatcacacagtactccacgggacaggtcagcgtggagatcgagtgggagctgcagaaggaaaacagcaaacgctggaatcccgaaattcagtacacttccaactacaacaagtctgttaatgtggactttactgtggacactaatggcgtgtattcagagcctcgccccattggcaccagatacctgactcgtaatctgtaattgcttgttaatcaataaaccgtttaattcgtttcagttgaactttggtctctgcgtatttctttcttatctagtttccatggctacgtagataagtagcatggcgggttaatcattaactacaaggaacccctagtgatggagttggccactccctctctgcgcgctcgctcgctcactgaggccgggcgaccaaaggtcgcccgacgcccgggctttgcccgggcggcctcagtgagcgagcgagcgcgcagagagggagtggccaa

SEQ ID NO: 26 - protein, 725 aa, Adeno-associated virus 5
MAADGYLPDWLEDTLSEGIRQWWKLKPGPPPPKPAERHKDDSRGLVLPGYKYLGPFNGLDKGEPVNEADAAALEHDKAYDRQLDSGDNPYLKYNHADAEFQERLKEDTSFGGNLGRAVFQAKKRVLEPFGLVEEGAKTAPTGKRIDDHFPKRKKARTEEDSKPSTSSDAEAGPSGSQQLQIPAQPASSLGADTMSAGGGGPLGDNNQGADGVGNASGDWHCDSTWMGDRVVTKSTRTWVLPSYNNHQYREIKSGSVDGSNANAYFGYSTPWGYFDFNRFHSHWSPRDWQRLINNYWGFRPRSLRVKIFNIQVKEVTVQDSTTTIANNLTSTVQVFTDDDYQLPYVVGNGTEGCLPAFPPQVFTLPQYGYATLNRDNTENPTERSSFFCLEYFPSKMLRTGNNFEFTYNFEEVPFHSSFAPSQNLFKLANPLVDQYLYRFVSTNNTGGVQFNKNLAGRYANTYKNWFPGPMGRTQGWNLGSGVNRASVSAFATTNRMELEGASYQVPPQPNGMTNNLQGSNTYALENTMIFNSQPANPGTTATYLEGNMLITSESETQPVNRVAYNVGGQMATNNQSSTTAPTTGTYNLQEIVPGSVWMERDVYLQGPIWAKIPETGAHFHPSPAMGGFGLKHPPPMMLIKNTPVPGNITSFSDVPVSSFITQYSTGQVTVEMEWELKKENSKRWNPEIQYTNNYNDPQFVDFAPDSTGEYRTTRPIGTRYLTRPL

SEQ ID NO: 27 - protein, 644 aa, Artificial Sequence
  source: /note="Description of Artificial Sequence: Synthetic polypeptide"
  MOD_RES (434)..(434): Any amino acid
KAYDQQLKAGDNPYLRYNHADAEFQERLQEDTSFGGNLGRAVFQAKKRVLEPLGLVETPAKTAPGKKRPVDSPDSTSGIGKKGQQPAKKRLNFGQTGDSESVPDPQPIGEPPAGPSGLGSGTMAAGGGAPMADNNEGADGVGNASGNWHCDSTWLGDRVITTSTRTWALPTYNNHLYKQISSQSAGSTNDNVYFGYSTPWGYFDFNRFHCHFSPRDWQRLINNNWGFRPKKLNFKLFNIQVKEVTTNDGVTTIANNLTSTVQVFSDSEYQLPYVLGSAHQGCLPPFPADVFMIPQYGYLTLNNGSQSVGRSSFYCLEYFPSQMLRTGNNFTFSYTFEDVPFHSSYAHSQSLDRLMNPLIDQYLYYLARTQSNAGGTAGNRELQFYQGGPTTMAEQAKNWLPGPCFRQQRVSKTLDQNNNSNFAWTGATKYHLNXRNSLVNPGVAMATHKDDEERFFPSSGVLIFGKTGAANKTTLENVLMTNEEEIRPTNPVATEEYGIVSSNLQAASTAAQTQVVNNQGALPGMVWQNRDVYLQGPIWAKIPHTDGNFHPSPLMGGFGLKHPPPQILIKNTPVPANPPEVFTPAKFASFITQYSTGQVSVEIEWELQKENSKRWNPEIQYTSNFDKQTGVDFAVDSQGVYSEP

SEQ ID NO: 28 - DNA, 1933 bp, Artificial Sequence
  source: /note="Description of Artificial Sequence: Synthetic polynucleotide"
caaggcctacgaccagcagctcaaagcgggtgacaatccgtacctgcggtataaccacgccgacgccgagtttcaggagtgtcttcaagaagatacgtcttttgggggcaacctcgggcgagcagtcttccaggccaaaaagcgggttctcgaacctcttggtctggttgagacgccagctaagacggcacctggaaagaagcgaccggtagactcgccagactccacctcgggcatcggcaagaaaggccagcagcccgcgaaaaagagactcaactttgggcagactggcgactcagagtcagtccccgaccctcaaccaatcggagaaccaccagcaggcccctctggtctgggatctggtacaatggttgcaggcggtggcgcaccaatggctgacaataacgagggcgccgacggagtgggtaatgcctcaggaaattggcattgcgattccacatggctgggcgacagagtcatcaccaccagcacccgaacctgggccctgcccacctacaacaaccacctctacaagcaaatctccagtcagtcagcagggagcaccaacgataacgtctatttcggctacagcaccccctgggggtattttgacttcaacagattccattgccacttctcaccacgtgactggcagcgacttatcaacaacaactggggattccggcccaagaagctcaacttcaagctcttcaacatccaggtcaaggaggtcacgacgaatgacggtgtcacaaccatcgctaataaccttaccagcacggttcaggtcttttcggactcggaatatcaactgccgtacgtcctcggctccgcgcaccagggctgcctgcctccgttcccggcagacgtgttcatgattccgcagtacggatacctgactctgaacaatggcagccaatcggtaggccgttcctccttctactgcctggagtactttccttctcagatgctgagaacgggcaacaacttcacctttagctacaccttcgaggacgtgcctttccacagcagctacgcgcacagccagagtctggaccggctgatgaatcccctcatcgaccagtacctgtactacttggccagaacacagagcaacgcaggaggtactgctggcaatcgggaactgcagttttatcagggcggacctaccaccatggccgaacaagcaaagaactggctgcccggaccttgcttccggcaacagagagtatccaagacgctggatcaaaataacaacagcaactttgcctggactggtgccacaaaataccatttaaatggaagaaattcattggttaatcccggtgtcgccatggcaacccacaaggacgacgaggaacgcttctccccttcgagcggagttctaatttttggcaaaactggagcagctaataaaactacattagaaaacgtgctcatgacaaatgaagaagaaattcgtcctaccaacccggtagctaccgaggaatacgggattgtaagcagcaacttgcaggcggctagcaccgcagcccagacacaagttgttaacaaccagggagccttacctggcatggtctggcagaaccgggacgtgtacctgcaaggtcccatttgggccaagattcctcacacggacggcaactttcacccgtctcctctaatgggtggctttggactgaaacacccgcctccccagatcctgatcaaaaacacgccggtacctgctaatcctccagaagtgtttactcctgccaagtttgcttccttcatcacgcagtacagcaccgggcaagtcagcgttgagatcgagtgggagctgcagaaagagaacagcaagcgctggaacccagagattcagtacacctccaactttgacaaacagactggagtggactttgctgttgacagccagggtgtttactctgagcct

SEQ ID NO: 29 - protein, 644 aa, Artificial Sequence
  source: /note="Description of Artificial Sequence: Synthetic polypeptide"
KAYDQQLKAGDNPYLRYNHADAEFQECLQEDTSFGGNLGRAVFQAKKRVLEPLGLVETPAKTAPGKKRPVDSPDSTSGIGKKGQQPAKKRLNFGQTGDSESVPDPQPIGEPPAGPSGLGSGTMVAGGGAPMADNNEGADGVGNASGNWHCDSTWLGDRVITTSTRTWALPTYNNHLYKQISSQSAGSTNDNVYFGYSTPWGYFDFNRFHCHFSPRDWQRLINNNWGFRPKKLNFKLFNIQVKEVTTNDGVTTIANNLTSTVQVFSDSEYQLPYVLGSAHQGCLPPFPADVFMIPQYGYLTLNNGSQSVGRSSFYCLEYFPSQMLRTGNNFTFSYTFEDVPFHSSYAHSQSLDRLMNPLIDQYLYYLARTQSNAGGTAGNRELQFYQGGPTTMAEQAKNWLPGPCFRQQRVSKTLDQNNNSNFAWTGATKYHLNGRNSLVNPGVAMATHKDDEERFSPSSGVLIFGKTGAANKTTLENVLMTNEEEIRPTNPVATEEYGIVSSNLQAASTAAQTQVVNNQGALPGMVWQNRDVYLQGPIWAKIPHTDGNFHPSPLMGGFGLKHPPPQILIKNTPVPANPPEVFTPAKFASFITQYSTGQVSVEIEWELQKENSKRWNPEIQYTSNFDKQTGVDFAVDSQGVYSEP

SEQ ID NO: 30 - DNA, 1933 bp, Artificial Sequence
  source: /note="Description of Artificial Sequence: Synthetic polynucleotide"
caaggcctacgaccagcagctcaaagcgggtgacaatccgtacctgcggtataaccacgccgacgccgagtttcaggagcgtcttcaagaagatacgtcttttgggggcaacctcgggcgagcagtcttccaggccaaaaagcgggttctcgaacctcttggtctggttgagacgccagctaagacggcacctggaaagaagcgaccggtagactcgccagactccacctcgggcatcggcaagaaaggccagcagcccgcgaaaaagagactcaactttgggcagactggcgactcagagccagtccccgaccctcaaccaatcggagaaccaccagcaggcccctctggtctgggatctggtacaatggctgcaggcggtggcgcaccaatggctgacaataacgagggcgccgacggagtgggtaatgcctcaggaaattggcattgcgattccacacggctgggcgacagagtcatcaccaccagcacccgaacctgggccctgcccacctacaacaaccacctctacaagcaaatctccagtcagtcagcagggagcaccaacgataacgtctatttcggctacagcaccccctgggggtattttgacttcaacagattccattgccacttctcaccacgtgactggcagcgacttatcaacaacaactggggattccggcccaagaagctcaacttcaagctcttcaacatccaggtcaaggaggtcacgacgaatgacggcgtcacaaccatcgctaataaccttaccagcacggttcaggtcttttcggactcggaatatcaactgccgtacgtcctcggctccgcgcaccagggctgcctgcctccgttcccggcagacgtgttcatgattccgcagtacggatacctgactctgaacaatggcagccaatcggtaggccgttcctccttctactgcctggagtactttccttctcagatgctgagaacgggcaacaacttcacctttagctacaccttcgaggacgtgcctttccacagcagctacgcgcacagccagagtctgggccggctgatgaatcccctcatcgaccagtacctgtactacttggccagaacacagagcaacgcaggaggtactgctggcaatcgggaactgcagttttatcagggcggacctaccaccatggccgaacaagcaaagaactggctgcccggaccttgcttccggcaacagagagtatccaagacgctggatcaaaataacaacagcaactttgcctggactggtgccacaaaataccatttaaatggaagaaattcattggttaatcccggtgtcgccatggcaacccacaaggacgacgaggaacgcttcttcccttcgagcggagttctaatttttggcaaaactggagcagctaataaaactacattagaaaacgtgctcatgacaaatgaagaagaaattcgtcctaccaacccggtagctaccgaggaatacgggattgtaagcagcaacttgcaggcggctagcaccgcagcccagacacaagttgttaacaaccagggagccttacctggcatggtctggcagaaccgggacgtgtacctgcaaggtcccatttgggccaagattcctcacacggacggcaactttcacccgtctcctctaatgggtggctttggactgaaacacccgcctccccagatcctgatcaaaaacacaccggtacctgctaatcctccagaagtgtttactcctgccaagtttgcttccttcatcacgcagtacagcaccgggcaagtcagcgttgagatcgaatgggagctgcagaaagagaacagcaagcgctggaacccagagattcagtacacctccaactttgacaaacagactggagtggactttgctgttgacagccagggtgtttactctgagcct

SEQ ID NO: 31 - protein, 644 aa, Artificial Sequence
  source: /note="Description of Artificial Sequence: Synthetic polypeptide"
KAYDQQLKAGDNPYLRYNHADAEFQERLQEDTSFGGNLGRAVFQAKKRVLEPLGLVETPAKTAPGKKRPVDSPDSTSGIGKKGQQPAKKRLNFGQTGDSEPVPDPQPIGEPPAGPSGLGSGTMAAGGGAPMADNNEGADGVGNASGNWHCDSTRLGDRVITTSTRTWALPTYNNHLYKQISSQSAGSTNDNVYFGYSTPWGYFDFNRFHCHFSPRDWQRLINNNWGFRPKKLNFKLFNIQVKEVTTNDGVTTIANNLTSTVQVFSDSEYQLPYVLGSAHQGCLPPFPADVFMIPQYGYLTLNNGSQSVGRSSFYCLEYFPSQMLRTGNNFTFSYTFEDVPFHSSYAHSQSLGRLMNPLIDQYLYYLARTQSNAGGTAGNRELQFYQGGPTTMAEQAKNWLPGPCFRQQRVSKTLDQNNNSNFAWTGATKYHLNGRNSLVNPGVAMATHKDDEERFFPSSGVLIFGKTGAANKTTLENVLMTNEEEIRPTNPVATEEYGIVSSNLQAASTAAQTQVVNNQGALPGMVWQNRDVYLQGPIWAKIPHTDGNFHPSPLMGGFGLKHPPPQILIKNTPVPANPPEVFTPAKFASFITQYSTGQVSVEIEWELQKENSKRWNPEIQYTSNFDKQTGVDFAVDSQGVYSEP

SEQ ID NO: 32 - DNA, 1933 bp, Artificial Sequence; identical to SEQ ID NO: 30
  source: /note="Description of Artificial Sequence: Synthetic polynucleotide"

SEQ ID NO: 33 - protein, 644 aa, Artificial Sequence; identical to SEQ ID NO: 31
  source: /note="Description of Artificial Sequence: Synthetic polypeptide"

SEQ ID NO: 34 - DNA, 1933 bp, Artificial Sequence
  source: /note="Description of Artificial Sequence: Synthetic polynucleotide"
caaggcctacgaccagcagctcaaagcgggtgacaatccgtacctgcggtataaccacgccgacgccgagtttcaggagcgtcttcaagaagatacgtcttttgggggcaacctcgggcgagcagtcttccaggccaaaaagcgggttctcgaacctcttggtctggttgagacgccagctaagacggcacctggaaagaagcgaccggtagactcgccagactccacctcgggcatcggcaagaaaggccagcagcccgcgaaaaagagactcaactttgggcagactggcgactcagagtcagtccccgaccctcaaccaatcggagaaccaccagcaggcccctctggtctgggatctggtacaatggctgcaggcggtggcgcaccaatggctgacaatagcgagggcgccgacggagtgggtaatgcctcaggaaattggcattgcgattccacatggctgggcgacagagtcatcaccaccagcacccgaacctgggccctgcccacctacaacaaccacctctacaagcaaatctccagtcagtcagcagggagcaccaacgataacgtctatttcggctacagcaccccctgggggtattttgacttcaacagattccattgccacttctcaccacgtgactggcagcgacttatcaacaacaactggggattccggcccaagaagctcaacttcaagctcttcaacatccaggtcaaggaggtcacgacgaatgacggtgtcacaaccatcgctaataaccttaccagcacggttcaggtcttttcggactcggaatatcaactgccgtacgtcctcggctccgcgcaccagggctgcctgcctccgttcccggcagacgtgttcatgattccgcagtacggatacctgactctgaacaatggcagccaatcggtaggccgttcctccttctactgcctggagtactttccttctcagatgctgagaacgggcaacaacttcacctttagctacaccttcgaggacgtgcctttccacagcagctacgcgcacagccagagtctggaccggctgatgaatcccctcatcgaccagtacctgtactacttggccagaacacagagcaacgcaggaggtactgctggcaatcgggaactgcagttttatcagggcggacctaccaccatggccgaacaagcaaagaactggctgcccggaccttgcttccggcaacagagagtatccaagacgctggatcaaaataacaacagcaactttgcctggactggtgccacaaaataccatttaaatggaagaaattcattggttaatcccggtgtcgccatggcaacccacaaggacgacgaggaacgcttcttcccttcgagcggagttctaatttttggcaaaactggagcagctaataaaactacattagaaaacgtgctcatgacaaatgaagaagaaattcgtcctaccaacccggtagctaccgaggaatacgggattgtaagcagcaacttgcaggcggctagcaccgcagcccagacacaagttgttaacaaccagggagccttacctggcatggtctggcagaaccgggacgtgtacctgcaaggtcccatttgggccaagattcctcacacggacggcaactttcacccgtctcctctaatgggtggctttggactgaaacacccgcctccccagatcctgatcaaaaacacaccggtacctgctaatcctccagaagtgtttactcctgccaagcttgcttccttcatcacgcagtacagcaccgggcaagtcagcgttgagatcgagtgggagctgcagaaagagaacagcaagcgctggaacccagagattcagtacacctccaactttgacaaacagactggagtggactttgctgttgacagccagggtgtttactctgagcct

SEQ ID NO: 35 - protein, 644 aa, Artificial Sequence
  source: /note="Description of Artificial Sequence: Synthetic polypeptide"
KAYDQQLKAGDNPYLRYNHADAEFQERLQEDTSFGGNLGRAVFQAKKRVLEPLGLVETPAKTAPGKKRPVDSPDSTSGIGKKGQQPAKKRLNFGQTGDSESVPDPQPIGEPPAGPSGLGSGTMAAGGGAPMADNSEGADGVGNASGNWHCDSTWLGDRVITTSTRTWALPTYNNHLYKQISSQSAGSTNDNVYFGYSTPWGYFDFNRFHCHFSPRDWQRLINNNWGFRPKKLNFKLFNIQVKEVTTNDGVTTIANNLTSTVQVFSDSEYQLPYVLGSAHQGCLPPFPADVFMIPQYGYLTLNNGSQSVGRSSFYCLEYFPSQMLRTGNNFTFSYTFEDVPFHSSYAHSQSLDRLMNPLIDQYLYYLARTQSNAGGTAGNRELQFYQGGPTTMAEQAKNWLPGPCFRQQRVSKTLDQNNNSNFAWTGATKYHLNGRNSLVNPGVAMATHKDDEERFFPSSGVLIFGKTGAANKTTLENVLMTNEEEIRPTNPVATEEYGIVSSNLQAASTAAQTQVVNNQGALPGMVWQNRDVYLQGPIWAKIPHTDGNFHPSPLMGGFGLKHPPPQILIKNTPVPANPPEVFTPAKLASFITQYSTGQVSVEIEWELQKENSKRWNPEIQYTSNFDKQTGVDFAVDSQGVYSEP

SEQ ID NO: 36 - DNA, 1933 bp, Artificial Sequence
  source: /note="Description of Artificial Sequence: Synthetic polynucleotide"
caaggcctacgaccagcagctcaaagcgggtgacaatccgtacctgcggtataaccacgccgacgccgagtttcaggagcgtcttcaagaagatacgtcttttgggggcaacctcgggcgagcagtcttccaggccaaaaagcgggttctcgaacctcttggtctggttgagacgccagctaagacggcacctggaaagaagcgaccggtagactcgccagactccacctcgggcatcggcaagaaaggccagcagcccgcgaaaaagagactcaactttgggcagactggcgactcagagtcagtccccgaccctcaaccaatcggagaaccaccagcaggcccctctggtctgggatctggtacaatggctgcaggcggtggcgcaccaatggctgacaataacgagggcgccgacggagtgggtaatgcctcaggaaattggcattgcgattccacatggctgggcgacagagtcatcaccaccagcacccgaacctgggccctgcccacctacaacaaccacctctacaagcaaatctccagtcagtcagcagggagcaccaacgataacgtctatttcggctacagcaccccctgggggtattttgacttcaacagattccattgccacttctcaccacgtgactggcagcgacttatcaacaacaactggggattccggcccaagaagctcaacttcaagctcttcaacatccaggtcaaggaggtcacgacgaatgacggcgtcacaaccatcgctaataaccttaccagcacggttcaggtcttttcggacccggaatatcaactgccgtacgtcctcggctccgcgcaccagggctgcctgcctccgttcccggcagacgtgttcatgattccgcagtacggatacctgactctgaacaatggcagccaatcggtaggccgttcctccttctactgcctggagtactttccttctcagatgctgagaacgggcaacaacttcacctttagctacaccttcgaggacgtgcctttccacagcagctacgcgcacagccagagtctggaccggctgatgaatcccctcatcgaccagtacctgtactacttggccagaacacagagcaacgcaggaggtactgctggcaatcgggaactgcagttttatcagggcggacctaccaccatggccgaacaagcaaagaactggctgcccggaccttgcttccggcaacagagagtatccaagacgctggatcaaaataacaacagcaactttgcctggactggtgccacaaaataccatttaaatggaagaaattcattggttaatcccggtgtcgccatggcaacccacaaggacgacgaggaacgcttcttcccttcgagcggagttctaatttttggcaaaactggagcagctaataaaactacattagaaaacgtgctcatgacaaatgaagaagaaattcgtcctaccaacccggtagctaccgaggaatacgggattgtaagcagcaacttgcaggcggctagcaccgcagcccagacacaagttgttaacaaccagggagccttacctggcatggtctggcagaaccgggacgtgtacctgcaaggtcccatttgggccaagattcctcacacggacggcaactttcacccgtctcctctaatgggtggctttggactgaaacacccgcctccccagatcctgatcaaaaacacaccggtacctgctaatcctccagaagtgtttactcctgccaagattgcttccttcatcacgcagtacagcaccgggcaagtcagcgttgagatcgagtgggagctgcagaaagagaacagcaagcgctggaacccagagattcagtacacctccaactttgacaaacagactggagtggactttgctgttgacagccagggtgtttactctgagcct

SEQ ID NO: 37 - protein, 644 aa, Artificial Sequence
  source: /note="Description of Artificial Sequence: Synthetic polypeptide"
KAYDQQLKAGDNPYLRYNHADAEFQERLQEDTSFGGNLGRAVFQAKKRVLEPLGLVETPAKTAPGKKRPVDSPDSTSGIGKKGQQPAKKRLNFGQTGDSESVPDPQPIGEPPAGPSGLGSGTMAAGGGAPMADNNEGADGVGNASGNWHCDSTWLGDRVITTSTRTWALPTYNNHLYKQISSQSAGSTNDNVYFGYSTPWGYFDFNRFHCHFSPRDWQRLINNNWGFRPKKLNFKLFNIQVKEVTTNDGVTTIANNLTSTVQVFSDPEYQLPYVLGSAHQGCLPPFPADVFMIPQYGYLTLNNGSQSVGRSSFYCLEYFPSQMLRTGNNFTFSYTFEDVPFHSSYAHSQSLDRLMNPLIDQYLYYLARTQSNAGGTAGNRELQFYQGGPTTMAEQAKNWLPGPCFRQQRVSKTLDQNNNSNFAWTGATKYHLNGRNSLVNPGVAMATHKDDEERFFPSSGVLIFGKTGAANKTTLENVLMTNEEEIRPTNPVATEEYGIVSSNLQAASTAAQTQVVNNQGALPGMVWQNRDVYLQGPIWAKIPHTDGNFHPSPLMGGFGLKHPPPQILIKNTPVPANPPEVFTPAKIASFITQYSTGQVSVEIEWELQKENSKRWNPEIQYTSNFDKQTGVDFAVDSQGVYSEP

SEQ ID NO: 38 - protein, 738 aa, Artificial Sequence
  source: /note="Description of Artificial Sequence: Synthetic polypeptide"
MAADGYLPDWLEDNLSEGIREWWALKPGAPKPKANQQKQDDGRGLVLPGYKYLGPFNGLDKGEPVNAADAAALEHDKAYDQQLKAGDNPYLRYNHADAEFQERLQEDTSFGGNLGRAVFQAKKRVLEPLGLVEEGAKTAPGKKRPVEPSPQRSPDSTTGIGKKGQQPAKKRLNFGQTGDSESVPDPQPIGEPPAGPSGLGSGTMAAGGGAPMADNNEGADGVGSSSGNWHCDSTWLGDRVITTSTRTWALPTYNNHLYKQISNGTSGGSTNDNTYFGYSTPWGYFDFNRFHCHFSPRDWQRLINNNWGFRPKRLNFKLFNIQVKEVTQNEGTKTIANNLTSTIQVFTDSEYQLPYVLGSARQGCLPPFPADVFMIPQYGYLTLNNGSQAVGRSSFYCLEYFPSQMLRTGNNFEFSYQFEDVPFHSSYAHSQSLDRLMNPLIDQYLYYLSRTQSTGGTAGTQQLLFSQAGPNNMSAQAKNWLPGPCYRQQRVSTTLSQNNNSNFAWTGATKYHLNGRDSLVNPGVAMATHKDDEERFFPSSGVLMFGKQGAGKGNVDYSSVMLTSEEEIKTTNPVATEQYGVVADNLQQQNAAPIVGAVNSQGALPGMVWQNRDVYLQGPIWAKIPHTDGNFHPSPLMGGFGLKHPPPQILIKNTPVPADPPTTFSQAKLASFITQYSTGQVSVEIEWELQKENSKRWNPEIQYTSNYYKSTNVDFAVNTDGTYSEPRPIGTRYLTRNL

SEQ ID NO: 39 - DNA, 3121 bp, Artificial Sequence
  source: /note="Description of Artificial Sequence: Synthetic polynucleotide"
gaattcgcccttctacggctgcgtcaactggaccaatgagaactttcccttcaacgactgtgtcgacaagatggtgatctggtgggaggaggggaagatgaccgccaaggtcgtggagtcggccaaagccattctcggaggaagcaaggtgcgcgtggaccagaaatgcaagtcctcggcccagatagacccgactcccgtgatcgtcacctccaacaccaacatgtgcgccgtgattgacgggaactcaacgaccttcgaacaccagcagccgttgcaagaccggatgttcaaatttgaactcacccgccgtctggatcatgactttgggaaggtcaccaagcaggaagtcaaagactttttccggtgggcaaaggatcacgtggttgaggtggagcacgaattctacgtcaaaaagggtggagccaagaaaagacccgcccccagtgacgcagatataagtgagcccaaacgggtgcgcgagtcagttgcgcagccatcgacgtcagacgcggaagcttcgatcaactacgcagacaggtaccaaaacaaatgttctcgtcacgcgggcatgaatctgatgctgtttccctgcagacaatgcgagagaatgaatcagaattcaaatatctgcttcactcacggacagaaagactgtttagagtgctttcccgtgtcagaatctcaacccgtttctgtcgtcaaaaaggcgtatcagaaactgtgctacattcatcatatcatgggaaaggtgccagacgcttgcactgcctgcgatctggtcgatgtggatttggatgactgcatctttgaacaataaatgatttaaatcaggtatggctgccgatggttatcttccagattggctcgaggacaacctctctgagggcattcgcgagtggtgggcgctgaaacctggagccccgaagcccaaagccaaccagcaaaagcaggacggcggccggggtctggtgcttcctggctacaagtacctcggacccttcaacggactcgacaagggggagcccgtcaacgcggcggacgcagcggccctcgagcacgacaaggcctacgaccagcagctcaaagcgggtgacaatccgtacctgcggtataaccacgccgacgccgagtttcaggagcgtctgcaagaagatacgtcttttgggggcaacctcgggcgagcagtcttccaggccaagaagcgggttctcgaacctctcggtctggttgaggaaggcgctaagacggctcctggaaagaagagaccggtagagccatcaccccagcgttctccagactcctctacgggcatcggcaagaaaggccagcagcccgcgaaaaagagactcaactttgggcagactggcgactcagagtcagtgcccgaccctcaaccaatcggagaaccccccgcaggcccctctggtctgggatctggtacaatggctgcaggcggtggcgctccaatggcagacaataacgaaggcgccgacggagtgggtagttcctcaggaaattggcattgcgattccacatggctgggcgactgagtcatcaccaccagcacccgaacctgggccctccccacctacaacaaccacctctacaagcaaatctccaacgggacttcgggaggaagcaccaacgacaacacctacttcggctacagcaccccctgggggtattttgactttaacagattccactgccacttctcaccacgtgactggcagcgactcatcaacaacaactggggattccggcccaagagactcaacttcaagctcttcaacatccaggtcaaggaggtcacgcagaatgaaggcaccaagaccatcgccaataaccttaccagcacgattcaggtctttacggactcggaataccagctcccgtacgtcctcggctctgcgcaccagggctgcctgcctccgttcccggcggacgtcttcatgattcctcagtacgggtacctgactctgaacaatggcagtcaggccgtgggccgttcctccttctactgcctggagtactttccttctcaaatgctgagaacgggcaacaactttgagttcagctaccagtttgaggacgtgccttttcacagcagctacgcgcacagccaaagcctggaccggctgatgaaccccctcatcgaccagtacctgtactacctgtctcggactcagtccacgggaggtaccgcaggaactcagcagttgctattttctcaggccgggcctaataacatgtcggctcaggccaaaaactggctacccgggccctgctaccggcagtaacgcgtctccacgacactgtcgcaaaataacaacagcaactttgtctggaccggtgccaccaagtatcatctgaatggcagagactctctggtagatcccggtgtcgctatggcaacccacaaggacgacgaagagcgattttttccgtccagcggagtcataatgtttgggaaacagggagctggaaaagacaacgtggactatagcagcgtcatgctaaccagtgaggaagaaattaaaaccaccaacccagtggccacagaacagtacggcgtggtggccgataacctgcaacagcaaaacgccgctcctattgtaggggccgtcaacagtcaaggagccttacctggcatggtctggcagaaccgggacgtgtacctgcagggtcctacctgggccaagattcctcacacggacggaaactttcatccctcgccgctgatgggaggctttggactgaaacacccgcctcctcagatcctgattaagaatacacctgttcccgcggatcctccaactaccttcagtcaagctaagctggcgtcgttcatcacgcagtacagcaccggacaggtcagcgtggaaattgaatgggagctgcaggaagaaaacagcaaacgctggaacccagagattcaatacacttccaactactacaaatctacaaatgtggactttgctgttaacacagatggcacttattctgagcctcgccccatcggcacccgttacctcacccgtaatctgtaattgcttgttaatcaataaaccggttgattcgtttcagttgaactttggtctctgcgaagggcgaattc

SEQ ID NO: 40 - protein, 738 aa, Artificial Sequence
  source: /note="Description of Artificial Sequence: Synthetic polypeptide"
MAADGYLPDWLEDNLSEGIREWWALKPGAPKPKANQQKQDDGRGLVLPGYKYLGPFNGLDKGEPVNAADAAALEHDKAYDQQLKAGDNPYLRYNHADAEFQERLQEDTSFGGNLGRAVFQAKKRVLEPLGLVEEGAKTAPGKKRPVEPSPQRSPDSSTGIGKKGQQPAKKRLNFGQTGDSESVPDPQPIGEPPAGPSGLGSGTMAAGGGAPMADNNEGADGVGSSSGNWHCDSTWLGDGVITTSTRTWALPTYNNHLYKQISNGTSGGSTNDNTYFGYSTPWGYFDFNRFHCHFSPRDWQRLINNNWGFRPKSLNFKLFNIQVKEVTQNEGTKTIANNLTSTIQVFTDSEYQLPYVLGSAHQGCLPPFPADVFMIPQYGYLTLNNGSQAVGRSSFYCLEYFPSQMLRTGNNFEFSYQFEDVPFHSSYAHSQSLDRLMNPLIDQYLYYLSRTQSTGGTAGTQQLLFSQAGPNNMSAQAKNWLPGPCYRQQRVSTTLSQNDNSNFAWTGATKYHLNGRDSLVNPGVAMATHKDDEERFFPSSGVLMFGKQGAGKDNVDYSSVMLTSEEEIKTTNPVATEQYGVVADNLQQQNAAPIVGAVNSQGALPGMVWQNRDVYLQGPIWAKIPHTDGNFHPSPLMGGFGLKHPPPQILIKNTPVPADPPTTFSQAKLASFITQYSTGQVSVEIEWELQKENSKRWNPEIQYTSNYYKSTNVDFAVNTDGTYSEPRPIGTRYLTRNL

SEQ ID NO: 41 - DNA, 3121 bp, Artificial Sequence
  source: /note="Description of Artificial Sequence: Synthetic polynucleotide"
gaattcgcccttcgcgagaccaaagttcaactgaaacgaatcaaccggtttattgattaacaagcaattacagattacgggtgaggtaacgggtgccgatggggcgaggctcagaataagtgccatctgtgttaacagcaaagtccacatttgtagatttgtagtagttggaagtgtattgaatctctgggttccagcgtttgctgttttctttctgcagctcccattcaatttccacgctgacctgtccggtgctgtactgcgtgatgaacgacgccagcttagcttgactgaaggtagttggaggatccgcgggaacaggtgtattcttaatcaggatctgaggaggcgggtgtttcagtccaaagcctcccatcagcggcgagggatgaaagtttccgtccgtgtgaggaatcttggcccagataggaccctgcaggtacacgtcccggttctgccagaccatgccaggtaaggctccttgactgttgacggcccctacaataggagcggcgttttgctgttgcaggttatcggccaccacgccgtactgttctgtggccactgggttggtggttttaatttcttcctcactggttagcataacgctgctatagtccacgttgtcttttccagctccctgtttcccaaacattaagactccgctggacggaaaaaatcgctcttcgtcgtccttgtgggttgccatagcgacaccgggatttaccagagagtctctgccattcagatgatacttggtggcaccggtccaggcaaagttgctgttgtcattttgcgacagtgtcgtggagacgcgttgctgccggtagcagggcccgggtagccagtttttggcctgagccgacatgttattaggcccggcctgagaaaatagcaactgctgagttcctgcggtacctcccgtggactgagtccgagacaggtagtacaggtactggtcgatgagggggttcatcagccggtccaggctttggctgtgcgcgtagctgctgtgaaaaggcacgtcctcaaactggtagctgaactcaaagttgttgcccgttctcagcatttgagaaggaaagtactccaggcagtagaaggaggaacggcccacggcctgactgccattgttcagagtcaggtacccgtactgaggaatcatgaagacgtccgccgggaacggaggcaggcagccctggtgcgcagagccgaggacgtacgggagctggtattccgagtccgtaaagacctgaatcgtgctggtaaggttattggcgatggtcttggtgccttcattctgcgtgacctccttgacctggatgttgaagagcttgaagttgaggctcttgggccggaatccccagttgttgttgatgagtcgctgccagtcacgtggtgagaagtggcagtggaatctgttaaagtcaaaatacccccagggggtgctgtagccgaagtaggtgttgtcgttggtgcttcctcccgaagtcccgttggagatttgcttgtagaggtggttgttgtaggtggggagggcccaggttcgggtgctggtggtgatgactccgtcgcccagccatgtggaatcgcaatgccaatttcctgaggaactacccactccgtcggcgccttcgttattgtctgccattggagcgccaccgcctgcagccattgtaccagatcccagaccagaggggcctgcggggggttctccgattggttgagggtcgggcactgactctgagtcgccagtctgcccaaagttgagtctctttttcgcgggctgctggcctttcttgccgatgcccgtagaggagtctggagaacgctggggtgatggctctaccggtctcttctttccaggagccgtcttagcgccttcctcaaccagaccgagaggttcgagaacccgcttcttggcctggaagactgctcgcccgaggttgcccccaaaagacgtatcttcttgcagacgctcctgaaactcggcgtcggcgtggttataccgcaggtacggattgtcacccgctttgagctgctggtcgtaggccttgtcgtgctcgagggccgctgcgtccgccgcgttgacgggctcccccttgtcgagtccgttgaagggtccgaggtacttgtagccaggaagcaccagaccccggccgtcgtcctgcttttgctggttggctttgggcttcggggctccaggtttcagcgcccaccactcgcgaatgccctcagagaggttgtcctcgagccaatctggaagataaccatcggcagccatacctgatttaaatcatttattgttcaaagatgcagtcatccaaatccacattgaccagatcgcaggcagtgcaagcgtctggcacctttcccatgatatgatgaatgtagcacagtttctgatacgcctttttgacgacagaaacgggttgagattctgacacgggaaagcactctaaacagtctttctgtccgtgagtgaagcagatatttgaattctgattcattctctcgcattgtctgcagggaaacagcatcagattcatgcccacgtgacgagaacatttgttttggtacctgtctgcgtagttgatcgaagcttccgcgtctgacgtcgatggctgcgcaactgactcgcgcacccgtttgggctcacttatatctgcgtcactgggggcgggtcttttcttggctccaccctttttgacgtagaattcatgctccacctcaaccacgtgatcctttgcccaccggaaaaagtctttgacttcctgcttggtgaccttcccaaagtcatgatccagacggcgggtgagttcaaatttgaacatccggtcttgcaacggctgctggtgttcgaaggtcgttgagttcccgtcaatcacggcgcacatgttggtgttggaggtgacgatcacgggagtcgggtctatctgggccgaggacttgcatttctggtccacgcgcaccttgcttcctccgagaatggctttggccgactccacgaccttggcggtcatcttcccctcctcccaccagatcaccatcttgtcgacacagtcgttgaagggaaagttctcattggtccagttgacgcagccgtagaaagggcgaattc

SEQ ID NO: 42 - DNA, 2211 bp, Artificial Sequence
  source: /note="Description of Artificial Sequence: Synthetic polynucleotide"
atggctgctgacggttatcttccagattggctcgaggacaacctttctgaaggcattcgtgagtggtgggctctgaaacctggagtccctcaacccaaagcgaaccaacaacaccaggacaaccgtcggggtcttgtgcttccgggttacaaatacctcggacccggtaacggactcgacaaaggagagccggtcaacgaggcggacgcggcagccctcgaacacgacaaagcttacgaccagcagctcaaggccggtgacaacccgtacctcaagtacaaccacgccgacgccgagtttcaggagcgtcttcaagaagatacgtcttttgggggcaaccttggcagagcagtcttccaggccaaaaagaggatccttgagcctcttggtctggttgaggaagcagctaaaacggctcctggaaagaagggggctgtagatcagtctcctcaggaaccggactcatcatctggtgttggcaaatcgggcaaacagcctgccagaaaaagactaaatttcggtcagactggagactcagagtcagtcccagaccctcaacctctcggagaaccaccagcagcccccacaagtttgggatctaatacaatggcttcaggcggtggcgcaccaatggcagacaataacgagggtgccgatggagtgggtaattcctcaggaaattggcattgcgattcccaatggctgggcgacagagtcatcaccaccagcaccagaacctgggccctgcccacttacaacaaccatctctacaagcaaatctccagccaatcaggagcttcaaacgacaaccactactttggctacagcaccccttgggggtattttgactttaacagattccactgccacttctcaccacgtgactggcagcgactcattaacaacaactggggattccggcccaagaaactcagcttcaagctcttcaacatccaagttagaggggtcacgcagaacgatggcacgacgactattgccaataaccttaccagcacggttcaagtgtttacggactcggagtatcagctcccgtacgtgctcgggtcggcgcaccaaggctgtctcccgccgtttccagcggacgtcttcatggtccctcagtatggatacctcaccctgaacaacggaagtcaagcggtgggacgctcatccttttactgcctggagtacttcccttcgcagatgctaaggactggaaataacttccaattcagctataccttcgaggatgtaccttttcacagcagctacgctcacagccagagtttggatcgcttgatgaatcctcttattgatcagtatctgtactacctgaacagaacgcaaggaacaacctctggaacaaccaaccaatcacggctgctttttagccaggctgggcctcagtctatgtctttgcaggccagaaattggctacctgggccctgctaccggcaacagagactttcaaagactgctaacgacaacaacaacagtaactttccttggacagcggccagcaaatatcatctcaatggccgcgactcgctggtgaatccaggaccagctatggccagtcacaaggacgatgaagaaaaatttttccctatgcacggcaatctaatatttggcaaagaagggacaacggcaagtaacgcagaattagataatgtaatgattacggatgaagaagagattcgtaccaccaatcctgtggcaacagagcagtatggaactgtggcaaataacttgcagagctcaaatacagctcccacgactggaactgtcaatcatcagggggccttacctggcatggtgtggcaagatcgtgacgtgtaccttcaaggacctatctgggcaaagattcctcacacggatggacactttcatccttctcctctgatgggaggctttggactgaaacatccgcctcctcaaatcatgatcaaaaatactccggtaccggcaaatcctccgacgactttcagcccggccaagtttgcttcatttatcactcagtactccactggacaggtcagcgtggaaattgagtgggagctacagaaagaaaacagcaaacgttggaatccagagattcagtacacttccaactacaacaagtctgttaatgtggactttactgtagacactaatggtgtttatagtgaacctcgccctattggaacccggtatctcacacgaaacttgtga

SEQ ID NO: 43 - protein, 736 aa, Adeno-associated virus 3
MAADGYLPDWLEDNLSEGIREWWALKPGVPQPKANQQHQDNRRGLVLPGYKYLGPGNGLDKGEPVNEADAAALEHDKAYDQQLKAGDNPYLKYNHADAEFQERLQEDTSFGGNLGRAVFQAKKRILEPLGLVEEAAKTAPGKKGAVDQSPQEPDSSSGVGKSGKQPARKRLNFGQTGDSESVPDPQPLGEPPAAPTSLGSNTMASGGGAPMADNNEGADGVGNSSGNWHCDSQWLGDRVITTSTRTWALPTYNNHLYKQISSQSGASNDNHYFGYSTPWGYFDFNRFHCHFSPRDWQRLINNNWGFRPKKLSFKLFNIQVRGVTQNDGTTTIANNLTSTVQVFTDSEYQLPYVLGSAHQGCLPPFPADVFMVPQYGYLTLNNGSQAVGRSSFYCLEYFPSQMLRTGNNFQFSYTFEDVPFHSSYAHSQSLDRLMNPLIDQYLYYLNRTQGTTSGTTNQSRLLFSQAGPQSMSLQARNWLPGPCYRQQRLSKTANDNNNSNFPWTAASKYHLNGRDSLVNPGPAMASHKDDEEKFFPMHGNLIFGKEGTTASNAELDNVMITDEEEIRTTNPVATEQYGTVANNLQSSNTAPTTGTVNHQGALPGMVWQDRDVYLQGPIWAKIPHTDGHFHPSPLMGGFGLKHPPPQIMIKNTPVPANPPTTFSPAKFASFITQYSTGQVSVEIEWELQKENSKRWNPEIQYTSNYNKSVNVDFTVDTNGVYSEPRPIGTRYLTRNL

SEQ ID NO: 44 - DNA, 4726 bp, Adeno-associated virus 3
ttggccactccctctatgcgcactcgctcgctcggtggggcctggcgaccaaaggtcgccagacggacgtgctttgcacgtccggccccaccgagcgagcgagtgcgcatagagggagtggccaactccatcactagaggtatggcagtgacgtaacgcgaagcgcgcgaagcgagaccacgcctaccagctgcgtcagcagtcaggtgacccttttgcgacagtttgcgacaccacgtggccgctgagggtatatattctcgagtgagcgaaccaggagctccattttgaccgcgaaatttgaacgagcagcagccatgccggggttctacgagattgtcctgaaggtcccgagtgacctggacgagcgcctgccgggcatttctaactcgtttgttaactgggtggccgagaaggaatgggacgtgccgccggattctgacatggatccgaatctgattgagcaggcacccctgaccgtggccgaaaagcttcagcgcgagttcctggtggagtggcgccgcgtgagtaaggccccggaggccctcttttttgtccagttcgaaaagggggagacctacttccacctgcacgtgctgattgagaccatcggggtcaaatccatggtggtcggccgctacgtgagccagattaaagagaagctggtgacccgcatctaccgcggggtcgagccgcagcttccgaactggttcgcggtgaccaaaacgcgaaatggcgccgggggcgggaacaaggtggtggacgactgctacatccccaactacctgctccccaagacccagcccgagctccagtgggcgtggactaacatggaccagtatttaagcgcctgtttgaatctcgcggagcgtaaacggctggtggcgcagcatctgacgcacgtgtcgcagacgcaggagcagaacaaagagaatcagaaccccaattctgacgcgccggtcatcaggtcaaaaacctcagccaggtacatggagctggtcgggtggctggtggaccgcgggatcacgtcagaaaagcaatggattcaggaggaccaggcctcgtacatctccttcaacgccgcctccaactcgcggtcccagatcaaggccgcgctggacaatgcctccaagatcatgagcctgacaaagacggctccggactacctggtgggcagcaacccgccggaggacattaccaaaaatcggatctaccaaatcctggagctgaacgggtacgatccgcagtacgcggcctccgtcttcctgggctgggcgcaaaagaagttcgggaagaggaacaccatctggctctttgggccggccacgacgggtaaaaccaacatcgcggaagccatcgcccacgccgtgcccttctacggctgcgtaaactggaccaatgagaactttcccttcaacgattgcgtcgacaagatggtgatctggtgggaggagggcaagatgacggccaaggtcgtggagagcgccaaggccattctgggcggaagcaaggtgcgcgtggaccaaaagtgcaagtcatcggcccagatcgaacccactcccgtgatcgtcacctccaacaccaacatgtgcgccgtgattgacgggaacagcaccaccttcgagcatcagcagccgctgcaggaccggatgtttgaatttgaacttacccgccgtttggaccatgactttgggaaggtcaccaaacaggaagtaaaggactttttccggtgggcttccgatcacgtgactgacgtggctcatgagttctacgtcagaaagggtggagctaagaaacgccccgcctccaatgacgcggatgtaagcgagccaaaacgggagtgcacgtcacttgcgcagccgacaacgtcagacgcggaagcaccggcggactacgcggacaggtaccaaaacaaatgttctcgtcacgtgggcatgaatctgatgctttttccctgtaaaacatgcgagagaatgaatcaaatttccaatgtctgttttacgcatggtcaaagagactgtggggaatgcttccctggaatgtcagaatctcaacccgtttctgtcgtcaaaaagaagacttatcagaaactgtgtccaattcatcatatcctgggaagggcacccgagattgcctgttcggcctgcgatttggccaatgtggacttggatgactgtgtttctgagcaataaatgacttaaaccaggtatggctgctgacggttatcttccagattggctcgaggacaacctttctgaaggcattcgtgagtggtgggctctgaaacctggagtccctcaacccaaagcgaaccaacaacaccaggacaaccgtcggggtcttgtgcttccgggttacaaatacctcggacccggtaacggactcgacaaaggagagccggtcaacgaggcggacgcggcagccctcgaacacgacaaagcttacgaccagcagctcaaggccggtgacaacccgtacctcaagtacaaccacgccgacgccgagtttcaggagcgtcttcaagaagatacgtcttttgggggcaaccttggcagagcagtcttccaggccaaaaagaggatccttgagcctcttggtctggttgaggaagcagctaaaacggctcctggaaagaagggggctgtagatcagtctcctcaggaaccggactcatcatctggtgttggcaaatcgggcaaacagcctgccagaaaaagactaaatttcggtcagactggagactcagagtcagtcccagaccctcaacctctcggagaaccaccagcagcccccacaagtttgggatctaatacaatggcttcaggcggtggcgcaccaatggcagacaataacgagggtgccgatggagtgggtaattcctcaggaaattggcattgcgattcccaatggctgggcgacagagtcatcaccaccagcaccagaacctgggccctgcccacttacaacaaccatctctacaagcaaatctccagccaatcaggagcttcaaacgacaaccactactttggctacagcaccccttgggggtattttgactttaacagattccactgccacttctcaccacgtgactggcagcgactcattaacaacaactggggattccggcccaagaaactcagcttcaagctcttcaacatccaagttagaggggtcacgcagaacgatggcacgacgactattgccaataaccttaccagcacggttcaagtgtttacggactcggagtatcagctcccgtacgtgctcgggtcggcgcaccaaggctgtctcccgccgtttccagcggacgtcttcatggtccctcagtatggatacctcaccctgaacaacggaagtcaagcggtgggacgctcatccttttactgcctggagtacttcccttcgcagatgctaaggactggaaataacttccaattcagctataccttcgaggatgtaccttttcacagcagctacgctcacagccagagtttggatcgcttgatgaatcctcttattgatcagtatctgtactacctgaacagaacgcaaggaacaacctctggaacaaccaaccaatcacggctgctttttagccaggctgggcctcagtctatgtctttgcaggccagaaattggctacctgggccctgctaccggcaacagagactttcaaagactgctaacgacaacaacaacagtaactttccttggacagcggccagcaaatatcatctcaatggccgcgactcgctggtgaatccaggaccagctatggccagtcacaaggacgatgaagaaaaatttttccctatgcacggcaatctaatatttggcaaagaagggacaacggcaagtaacgcagaattagataatgtaatgattacggatgaagaagagattcgtaccaccaatcctgtggcaacagagcagtatggaactgtggcaaataacttgcagagctcaaatacagctcccacgactggaactgtcaatcatcagggggccttacctggcatggtgtggcaagatcgtgacgtgtaccttcaaggacctatctgggcaaagattcctcacacggatggacactttcatccttctcctctgatgggaggctttggactgaaacatccgcctcctcaaatcatgatcaaaaatactccggtaccggcaaatcctccgacgactttcagcccggccaagtttgcttcatttatcactcagtactccactggacaggtcagcgtggaaattgagtgggagctacagaaagaaaacagcaaacgttggaatccagagattcagtacacttccaactacaacaagtctgttaatgtggactttactgtagacactaatggtgtttatagtgaacctcgccctattggaacccggtatctcacacgaaacttgtgaatcctggttaatcaataaaccgtttaattcgtttcagttgaactttggctcttgtgcacttctttatctttatcttgtttccatggctactgcgtagataagcagcggcctgcggcgcttgcgcttcgcggtttacaactgctggttaatatttaactctcgccatacctctagtgatggagttggccactccctctatgcgcactcgctcgctcggtggggcctggcgaccaaaggtcgccagacggacgtgctttgcacgtccggccccaccgagcgagcgagtgcgcatagagggagtggccaa

SEQ ID NO: 45 - protein, 737 aa, Artificial Sequence
  source: /note="Description of Artificial Sequence: Synthetic polypeptide"
MAADGYLPDWLEDNLSEGIREWWDLKPGAPKPKANQQKQDNGRGLVLPGYKYLGPFNGLDKGEPVNAADAAALEHDKAYDQQLNAGDNPYLRYNHADAEFQERLQEDTSFGGNLGRAVFQAKKRVLEPLGLVEEGAKTAPAKKRPVEPSPQRSPDSSTGIGKKGQQPARKRLNFGQTGDSESVPDPQPLGEPPAAPSSVGSGTVAAGGGAPMADNNEGADGVGNASGNWHCDSTWLGDRVITTSTRTWALPTYNNHLYEQISSETAGSTNDNTYFGYSTPWGYFDFNRFHCHFSPRDWQRLINNNWGFRPKKLRFKLFNIQVKEVTTNDGVTTIANNLTSTIQVFSDSEYQLPYVLGSAHQGCLPPFPADVFMIPQYGYLTLNNGSQSVGRSSFYCLEYFPSQMLRTGNNFEFSYSFEDVPFHSSYAHSQSLDRLMNPLIDQYLYYLARTQSDPGGTAGNRELQFYQGGPSTMAEQAKNWLPGPCFRQQRVSKTLDQNNNSNFAWTGATKYHLNGRNSLVNPGVAMATHKDDEDRFFPSSGVLIFGKTGATNKTTLENVLMTNEEEIRPTNPVATEEYGIVSSNLQAANTAAQTQVVNNQGALPGMVWQNRDVYLQGPIWAKIPHTDGNFHPSPLMGGFGLKHPPPQILIKNTPVPANPPEVFTPAKFASFITQYSTGQVSVEIEWELQKENSKRWDPEIQYTSNFEKQTGVDFAVDSQGVYSEPRPIGTRYLTRNL

SEQ ID NO: 46 - DNA, 2211 bp, Artificial Sequence
  source: /note="Description of Artificial Sequence: Synthetic polynucleotide"
atggctgctgacggttatcttccagattggctcgaggacaacctttctgaaggcattcgtgagtggtgggctctgaaacctggagtccctcaacccaaagcgaaccaacaacaccaggacaaccgtcggggtcttgtgcttccgggttacaaatacctcggacccggtaacggactcgacaaaggagagccggtcaacgaggcggacgcggcagccctcgaacacgacaaagcttacgaccagcagctcaaggccggtgacaacccgtacctcaagtacaaccacgccgacgccgagtttcaggagcgtcttcaagaagatacgtcttttgggggcaaccttggcagagcagtcttccaggccaaaaagaggatccttgagcctcttggtctggttgaggaagcagctaaaacggctcctggaaagaagggggctgtagatcagtctcctcaggaaccggactcatcatctggtgttggcaaatcgggcaaacagcctgccagaaaaagactaaatttcggtcagactggagactcagagtcagtcccagaccctcaacctctcggagaaccaccagcagcccccacaagtttgggatctaatacaatggcttcaggcggtggcgcaccaatggcagacaataacgagggtgccgatggagtgggtaattcctcaggaaattggcattgcgattcccaatggctgggcgacagagtcatcaccaccagcaccagaacctgggccctgcccacttacaacaaccatctctacaagcaaatctccagccaatcaggagcttcaaacgacaaccactactttggctacagcaccccttgggggtattttgactttaacagattccactgccacttctcaccacgtgactggcagcgactcattaacaacaactggggattccggcccaagaaactcagcttcaagctcttcaacatccaagttagaggggtcacgcagaacgatggcacgacgactattgccaataaccttaccagcacggttcaagtgtttacggactcggagtatcagctcccgtacgtgctcgggtcggcgcaccaaggctgtctcccgccgtttccagcggacgtcttcatggtccctcagtatggatacctcaccctgaacaacggaagtcaagcggtgggacgctcatccttttactgcctggagtacttcccttcgcagatgctaaggactggaaataacttccaattcagctataccttcgaggatgtaccttttcacagcagctacgctcacagccagagtttggatcgcttgatgaatcctcttattgatcagtatctgtactacctgaacagaacgcaaggaacaacctctggaacaaccaaccaatcacggctgctttttagccaggctgggcctcagtctatgtctttgcaggccagaaattggctacctgggccctgctaccggcaacagagactttcaaagactgctaacgacaacaacaacagtaactttccttggacagcggccagcaaatatcatctcaatggccgcgactcgctggtgaatccaggaccagctatggccagtcacaaggacgatgaagaaaaatttttccctatgcacggcaatctaatatttggcaaagaagggacaacggcaagtaacgcagaattagataatgtaatgattacggatgaagaagagattcgtaccaccaatcctgtggcaacagagcagtatggaactgtggcaaataacttgcagagctcaaatacagctcccacgactggaactgtcaatcatcagggggccttacctggcatggtgtggcaagatcgtgacgtgtaccttcaaggacctatctgggcaaagattcctcacacggatggacactttcatccttctcctctgatgggaggctttggactgaaacatccgcctcctcaaatcatgatcaaaaatactccggtaccggcaaatcctccgacgactttcagcccggccaagtttgcttcatttatcactcagtactccactggacaggtcagcgtggaaattgagtgggagctacagaaagaaaacagcaaacgttggaatccagagattcagtacacttccaactacaacaagtctgttaatgtggactttactgtagacactaatggtgtttatagtgaacctcgccctattggaacccggtatctcacacgaaacttgtaa

SEQ ID NO: 47 - protein, 736 aa, Artificial Sequence; identical to SEQ ID NO: 43
  source: /note="Description of Artificial Sequence: Synthetic polypeptide"

SEQ ID NO: 48 - protein, 736 aa, Adeno-associated virus 3A; identical to SEQ ID NO: 43

SEQ ID NO: 49 - protein, 624 aa, Adeno-associated virus 3A
MPGFYEIVLKVPSDLDERLPGISNSFVNWVAEKEWDVPPDSDMDPNLIEQAPLTVAEKLQREFLVEWRRVSKAPEALFFVQFEKGETYFHLHVLIETIGVKSMVVGRYVSQIKEKLVTRIYRGVEPQLPNWFAVTKTRNGAGGGNKVVDDCYIPNYLLPKTQPELQWAWTNMDQYLSACLNLAERKRLVAQHLTHVSQTQEQNKENQNPNSDAPVIRSKTSARYMELVGWLVDRGITSEKQWIQEDQASYISFNAASNSRSQIKAALDNASKIMSLTKTAPDYLVGSNPPEDITKNRIYQILELNGYDPQYAASVFLGWAQKKFGKRNTIWLFGPATTGKTNIAEAIAHAVPFYGCVNWTNENFPFNDCVDKMVIWWEEGKMTAKVVESAKAILGGSKVRVDQKCKSSAQIEPTPVIVTSNTNMCAVIDGNSTTFEHQQPLQDRMFEFELTRRLDHDFGKVTKQEVKDFFRWASDHVTDVAHEFYVRKGGAKKRPASNDADVSEPKRECTSLAQPTTSDAEAPADYADRYQNKCSRHVGMNLMLFPCKTCERMNQISNVCFTHGQRDCGECFPGMSESQPVSVVKKKTYQKLCPIHHILGRAPEIACSACDLANVDLDDCVSEQ

SEQ ID NO: 50 - protein, 736 aa, Adeno-associated virus 3B
MAADGYLPDWLEDNLSEGIREWWALKPGVPQPKANQQHQDNRRGLVLPGYKYLGPGNGLDKGEPVNEADAAALEHDKAYDQQLKAGDNPYLKYNHADAEFQERLQEDTSFGGNLGRAVFQAKKRILEPLGLVEEAAKTAPGKKRPVDQSPQEPDSSSGVGKSGKQPARKRLNFGQTGDSESVPDPQPLGEPPAAPTSLGSNTMASGGGAPMADNNEGADGVGNSSGNWHCDSQWLGDRVITTSTRTWALPTYNNHLYKQISSQSGASNDNHYFGYSTPWGYFDFNRFHCHFSPRDWQRLINNNWGFRPKKLSFKLFNIQVKEVTQNDGTTTIANNLTSTVQVFTDSEYQLPYVLGSAHQGCLPPFPADVFMVPQYGYLTLNNGSQAVGRSSFYCLEYFPSQMLRTGNNFQFSYTFEDVPFHSSYAHSQSLDRLMNPLIDQYLYYLNRTQGTTSGTTNQSRLLFSQAGPQSMSLQARNWLPGPCYRQQRLSKTANDNNNSNFPWTAASKYHLNGRDSLVNPGPAMASHKDDEEKFFPMHGNLIFGKEGTTASNAELDNVMITDEEEIRTTNPVATEQYGTVANNLQSSNTAPTTRTVNDQGALPGMVWQDRDVYLQGPIWAKIPHTDGHFHPSPLMGGFGLKHPPPQIMIKNTPVPANPPTTFSPAKFASFITQYSTGQVSVEIEWELQKENSKRWNPEIQYTSNYNKSVNVDFTVDTNGVYSEPRPIGTRYLTRNL

SEQ ID NO: 51 - protein, 624 aa, Adeno-associated virus 3B
MPGFYEIVLKVPSDLDEHLPGISNSFVNWVAEKEWELPPDSDMDPNLIEQAPLTVAEKLQREFLVEWRRVSKAPEALFFVQFEKGETYFHLHVLIETIGVKSMVVGRYVSQIKEKLVTRIYRGVEPQLPNWFAVTKTRNGAGGGNKVVDDCYIPNYLLPKTQPELQWAWTNMDQYLSACLNLAERKRLVAQHLTHVSQTQEQNKENQNPNSDAPVIRSKTSARYMELVGWLVDRGITSEKQWIQEDQASYISFNAASNSRSQIKAALDNASKIMSLTKTAPDYLVGSNPPEDITKNRIYQILELNGYDPQYAASVFLGWAQKKFGKRNTIWLFGPATTGKTNIAEAIAHAVPFYGCVNWTNENFPFNDCVDKMVIWWEEGKMTAKVVESAKAILGGSKVRVDQKCKSSAQIEPTPVIVTSNTNMCAVIDGNSTTFEHQQPLQDRMFKFELTRRLDHDFGKVTKQEVKDFFRWASDHVTDVAHEFYVRKGGAKKRPASNDADVSEPKRQCTSLAQPTTSDAEAPADYADRYQNKCSRHVGMNLMLFPCKTCERMNQISNVCFTHGQRDCGECFPGMSESQPVSVVKKKTYQKLCPIHHILGRAPEIACSACDLANVDLDDCVSEQ

SEQ ID NO: 52 - DNA, 4722 bp, Adeno-associated virus 3B
tggccactccctctatgcgcactcgctcgctcggtggggcctggcgaccaaaggtcgccagacggacgtgctttgcacgtccggccccaccgagcgagcgagtgcgcatagagggagtggccaactccatcactagaggtatggcagtgacgtaacgcgaagcgcgcgaagcgagaccacgcctaccagctgcgtcagcagtcaggtgacccttttgcgacagtttgcgacaccacgtggccgctgagggtatatattctcgagtgagcgaaccaggagctccattttgaccgcgaaatttgaacgagcagcagccatgccggggttctacgagattgtcctgaaggtcccgagtgacctggacgagcacctgccgggcatttctaactcgtttgttaactgggtggccgagaaggaatgggagctgccgccggattctgacatggatccgaatctgattgagcaggcacccctgaccgtggccgaaaagcttcagcgcgagttcctggtggagtggcgccgcgtgagtaaggccccggaggccctcttttttgtccagttcgaaaagggggagacctacttccacctgcacgtgctgattgagaccatcggggtcaaatccatggtggtcggccgctacgtgagccagattaaagagaagctggtgacccgcatctaccgcggggtcgagccgcagcttccgaactggttcgcggtgaccaaaacgcgaaatggcgccgggggcgggaacaaggtggtggacgactgctacatccccaactacctgctccccaagacccagcccgagctccagtgggcgtggactaacatggaccagtatttaagcgcctgtttgaatctcgcggagcgtaaacggctggtggcgcagcatctgacgcacgtgtcgcagacgcaggagcagaacaaagagaatcagaaccccaattctgacgcgccggtcatcaggtcaaaaacctcagccaggtacatggagctggtcgggtggctggtggaccgcgggatcacgtcagaaaagcaatggattcaggaggaccaggcctcgtacatctccttcaacgccgcctccaactcgcggtcccagatcaaggccgcgctggacaatgcctccaagatcatgagcctgacaaagacggctccggactacctggtgggcagcaacccgccggaggacattaccaaaaatcggatctaccaaatcctggagctgaacgggtacgatccgcagtacgcggcctccgtcttcctgggctgggcgcaaaagaagttcgggaagaggaacaccatctggctctttgggccggccacgacgggtaaaaccaacatcgcggaagccatcgcccacgccgtgcccttctacggctgcgtaaactggaccaatgagaactttcccttcaacgattgcgtcgacaagatggtgatctggtgggaggagggcaagatgacggccaaggtcgtggagagcgccaaggccattctgggcggaagcaaggtgcgcgtggaccaaaagtgcaagtcatcggcccagatcgaacccactcccgtgatcgtcacctccaacaccaacatgtgcgccgtgattgacgggaacagcaccaccttcgagcatcagcagccgctgcaggaccggatgtttaaatttgaacttacccgccgtttggaccatgactttgggaaggtcaccaaacaggaagtaaaggactttttccggtgggcttccgatcacgtgactgacgtggctcatgagttctacgtcagaaagggtggagctaagaaacgccccgcctccaatgacgcggatgtaagcgagccaaaacggcagtgcacgtcacttgcgcagccgacaacgtcagacgcggaagcaccggcggactacgcggacaggtaccaaaacaaatgttctcgtcacgtgggcatgaatctgatgctttttccctgtaaaacatgcgagagaatgaatcaaatttccaatgtctgttttacgcatggtcaaagagactgtggggaatgcttccctggaatgtcagaatctcaacccgtttctgtcgtcaaaaagaagacttatcagaaactgtgtccaattcatcatatcctgggaagggcacccgagattgcctgttcggcctgcgatttggccaatgtggacttggatgactgtgtttctgagcaataaatgacttaaaccaggtatggctgctgacggttatcttccagattggctcgaggacaacctttctgaaggcattcgtgagtggtgggctctgaaacctggagtccctcaacccaaagcgaaccaacaacaccaggacaaccgtcggggtcttgtgcttccgggttacaaatacctcggacccggtaacggactcgacaaaggagagccggtcaacgaggcggacgcggcagccctcgaacacgacaaagcttacgaccagcagctcaaggccggtgacaacccgtacctcaagtacaaccacgccgacgccgagtttcaggagcgtcttcaagaagatacgtcttttgggggcaaccttggcagagcagtcttccaggccaaaaagaggatccttgagcctcttggtctggttgaggaagcagctaaaacggctcctggaaagaagaggcctgtagatcagtctcctcaggaaccggactcatcatctggtgttggcaaatcgggcaaacagcctgccagaaaaagactaaatttcggtcagactggcgactcagagtcagtcccagaccctcaacctctcggagaaccaccagcagcccccacaagtttgggatctaatacaatggcttcaggcggtggcgcaccaatggcagacaataacgagggtgccgatggagtgggtaattcctcaggaaattggcattgcgattcccaatggctgggcgacagagtcatcaccaccagcaccagaacctgggccctgcccacttacaacaaccatctctacaagcaaatctccagccaatcaggagcttcaaacgacaaccactactttggctacagcaccccttgggggtattttgactttaacagattccactgccacttctcaccacgtgactggcagcgactcattaacaacaactggggattccggcccaagaaactcagcttcaagctcttcaacatccaagttaaagaggtcacgcagaacgatggcacgacgactattgccaataaccttaccagcacggttcaagtgtttacggactcggagtatcagctcccgtacgtgctcgggtcggcgcaccaaggctgtctcccgccgtttccagcggacgtcttcatggtccctcagtatggatacctcaccctgaacaacggaagtcaagcggtgggacgctcatccttttactgcctggagtacttcccttcgcagatgctaaggactggaaataacttccaattcagctataccttcgaggatgtaccttttcacagcagctacgctcacagccagagtttggatcgcttgatgaatcctcttattgatcagtatctgtactacctgaacagaacgcaaggaacaacctctggaacaaccaaccaatcacggctgctttttagccaggctgggcctcagtctatgtctttgcaggccagaaattggctacctgggccctgctaccggcaacagagactttcaaagactgctaacgacaacaacaacagtaactttccttggacagcggccagcaaatatcatctcaatggccgcgactcgctggtgaatccaggaccagctatggccagtcacaaggacgatgaagaaaaatttttccctatgcacggcaatctaatatttggcaaagaagggacaacggcaagtaacgcagaattagataatgtaatgattacggatgaagaagagattcgtaccaccaatcctgtggcaacagagcagtatggaactgtggcaaataacttgcagagctcaaatacagctcccacgactagaactgtcaatgatcagggggccttacctggcatggtgtggcaagatcgtgacgtgtaccttcaaggacctatctgggcaaagattcctcacacggatggacactttcatccttctcctctgatgggaggctttggactgaaacatccgcctcctcaaatcatgatcaaaaatactccggtaccggcaaatcctccgacgactttcagcccggccaagtttgcttcatttatcactcagtactccactggacaggtcagcgtggaaattgagtgggagctacagaaagaaaacagcaaacgttggaatccagagattcagtacacttccaactacaacaagtctgttaatgtggactttactgtagacactaatggtgtttatagtgaacctcgccctattggaacccggtatctcacacgaaacttgtaatcctggttaatcaataaaccgtttaattcgtttcagttgaactttggctcttgtgcacttcttatcttatcttgtttccatggctactgcgtagataagcagcggcctgcggcgcttgcgcttcgcggtttacaactgctggttaatatttaactctcgccatacctctagtgatggagttggccactccctctatgcgcactcgctcgctcggtggggccggacgtgcaaagcacgtccgtctggcgacctttggtcgccaggccccaccgagcgagcgagtgcgcatagagggagtggccaa

SEQ ID NO: 53 - DNA, 1800 bp, Adeno-associated virus 4
  modified_base (342)..(342): a, c, t, or g
acggctcctggaaagaagagaccgttgattgaatccccccagcagcccgactcctccacgggtatcggcaaaaaaggcaagcagccggctaaaaagaagctcgttttcgaagacgaaactggagcaggcgacggaccccctgagggatcaacttccggagccatgtctgatgacagtgagatgcgtgcagcagctggcggagctgcagtcgagggsggacaaggtgccgatggagtgggtaatgcctcgggtgattggcattgcgattccacctggtctgagggccacgtcacgaccaccagcaccagaacctgggtcttgcccacctacaacaaccacctntacaagcgactcggagagagcctgcagtccaacacctacaacggattctccaccccctggggatactttgacttcaaccgcttccactgccacttctcaccacgtgactggcagcgactcatcaacaacaactggggcatgcgacccaaagccatgcgggtcaaaatcttcaacatccaggtcaaggaggtcacgacgtcgaacggcgagacaacggtggctaataaccttaccagcacggttcagatctttgcggactcgtcgtacgaactgccgtacgtgatggatgcgggtcaagagggcagcctgcctccttttcccaacgacgtctttatggtgccccagtacggctactgtggactggtgaccggcaacacttcgcagcaacagactgacagaaatgccttctactgcctggagtactttccttcgcagatgctgcggactggcaacaactttgaaattacgtacagttttgagaaggtgcctttccactcgatgtacgcgcacagccagagcctggaccggctgatgaaccctctcatcgaccagtacctgtggggactgcaatcgaccaccaccggaaccaccctgaatgccgggactgccaccaccaactttaccaagctgcggcctaccaacttttccaactttaaaaagaactggctgcccgggccttcaatcaagcagcagggcttctcaaagactgccaatcaaaactacaagatccctgccaccgggtcagacagtctcatcaaatacgagacgcacagcactctggacggaagatggagtgccctgacccccggacctccaatggccacggctggacctgcggacagcaagttcagcaacagccagctcatctttgcggggcctaaacagaacggcaacacggccaccgtacccgggactctgatcttcacctctgaggaggagctggcagccaccaacgccaccgatacggacatgtggggcaacctacctggcggtgaccagagcaacagcaacctgccgaccgtggacagactgacagccttgggagccgtgcctggaatggtctggcaaaacagagacatttactaccagggtcccatttgggccaagattcctcataccgatggacactttcacccctcaccgctgattggtgggtttgggctgaaacacccgcctcctcaaatttttatcaagaacaccccggtacctgcgaatcctgcaacgaccttcagctctactccggtaaactccttcattactcagtacagcactggccaggtgtcggtgcagattgactgggagatccagaaggagcggtccaaacgctggaaccccgaggtccagtttacctccaactacggacagcaaaactctctgttgtgggctcccgatgcggctgggaaatacactgagcctagggctatcggtacccgctacctcacccaccacctgtaataa

SEQ ID NO: 54 - DNA, 2208 bp, Adeno-associated virus 4
  modified_base (750)..(750): a, c, t, or g
atgactgacggttaccttccagattggctagaggacaacctctctgaaggcgttcgagagtggtgggcgctgcaacctggagcccctaaacccaaggcaaatcaacaacatcaggacaacgctcggggtcttgtgcttccgggttacaaatacctcggacccggcaacggactcgacaagggggaacccgtcaacgcagcggacgcggcagccctcgagcacgacaaggcctacgaccagcagctcaaggccggtgacaacccctacctcaagtacaaccacgccgacgcggagttccagcagcggcttcagggcgacacatcgtttgggggcaacctcggcagagcagtcttccaggccaaaaagagggttcttgaacctcttggtctggttgagcaagcgggtgagacggctcctggaaagaagagaccgttgattgaatccccccagcagcccgactcctccacgggtatcggcaaaaaaggcaagcagccggctaaaaagaagctcgttttcgaagacgaaactggagcaggcgacggaccccctgagggatcaacttccggagccatgtctgatgacagtgagatgcgtgcagcagctggcggagctgcagtcgagggsggacaaggtgccgatggagtgggtaatgcctcgggtgattggcattgcgattccacctggtctgagggccacgtcacgaccaccagcaccagaacctgggtcttgcccacctacaacaaccacctntacaagcgactcggagagagcctgcagtccaacacctacaacggattctccaccccctggggatactttgacttcaaccgcttccactgccacttctcaccacgtgactggcagcgactcatcaacaacaactggggcatgcgacccaaagccatgcgggtcaaaatcttcaacatccaggtcaaggaggtcacgacgtcgaacggcgagacaacggtggctaataaccttaccagcacggttcagatctttgcggactcgtcgtacgaactgccgtacgtgatggatgcgggtcaagagggcagcctgcctccttttcccaacgacgtctttatggtgccccagtacggctactgtggactggtgaccggcaacacttcgcagcaacagactgacagaaatgccttctactgcctggagtactttccttcgcagatgctgcggactggcaacaactttgaaattacgtacagttttgagaaggtgcctttccactcgatgtacgcgcacagccagagcctggaccggctgatgaaccctctcatcgaccagtacctgtggggactgcaatcgaccaccaccggaaccaccctgaatgccgggactgccaccaccaactttaccaagctgcggcctaccaacttttccaactttaaaaagaactggctgcccgggccttcaatcaagcagcagggcttctcaaagactgccaatcaaaactacaagatccctgccaccgggtcagacagtctcatcaaatacgagacgcacagcactctggacggaagatggagtgccctgacccccggacctccaatggccacggctggacctgcggacagcaagttcagcaacagccagctcatctttgcggggcctaaacagaacggcaacacggccaccgtacccgggactctgatcttcacctctgaggaggagctggcagccaccaacgccaccgatacggacatgtggggcaacctacctggcggtgaccagagcaacagcaacctgccgaccgtggacagactgacagccttgggagccgtgcctggaatggtctggcaaaacagagacatttactaccagggtcccatttgggccaagattcctcataccgatggacactttcacccctcaccgctgattggtgggtttgggctgaaacacccgcctcctcaaatttttatcaagaacaccccggtacctgcgaatcctgcaacgaccttcagctctactccggtaaactccttcattactcagtacagcactggccaggtgtcggtgcagattgactgggagatccagaaggagcggtccaaacgctggaaccccgaggtccagtttacctccaactacggacagcaaaactctctgttgtgggctcccgatgcggctgggaaatacactgagcctagggctatcggtacccgctacctcacccaccacctgtaataa

SEQ ID NO: 55 - DNA, 1872 bp, Adeno-associated virus 4
atgccggggttctacgagatcgtgctgaaggtgcccagcgacctggacgagcacctgcccggcatttctgactcttttgtgagctgggtggccgagaaggaatgggagctgccgccggattctgacatggacttgaatctgattgagcaggcacccctgaccgtggccgaaaagctgcaacgcgagttcctggtcgagtggcgccgcgtgagtaaggccccggaggccctcttctttgtccagttcgagaagggggacagctacttccacctgcacatcctggtggagaccgtgggcgtcaaatccatggtggtgggccgctacgtgagccagattaaagagaagctggtgacccgcatctaccgcggggtcgagccgcagcttccgaactggttcgcggtgaccaagacgcgtaatggcgccggaggcgggaacaaggtggtggacgactgctacatccccaactacctgctccccaagacccagcccgagctccagtgggcgtggactaacatggaccagtatataagcgcctgtttgaatctcgcggagcgtaaacggctggtggcgcagcatctgacgcacgtgtcgcagacgcaggagcagaacaaggaaaaccagaaccccaattctgacgcgccggtcatcaggtcaaaaacctccgccaggtacatggagctggtcgggtggctggtggaccgcgggatcacgtcagaaaagcaatggatccaggaggaccaggcgtcctacatctccttcaacgccgcctccaactcgcggtcacaaatcaaggccgcgctggacaatgcctccaaaatcatgagcctgacaaagacggctccggactacctggtgggccagaacccgccggaggacatttccagcaaccgcatctaccgaatcctcgagatgaacgggtacgatccgcagtacgcggcctccgtcttcctgggctgggcgcaaaagaagttcgggaagaggaacaccatctggctctttgggccggccacgacgggtaaaaccaacatcgcggaagccatcgcccacgccgtgcccttctacggctgcgtgaactggaccaatgagaactttccgttcaacgattgcgtcgacaagatggtgatctggtgggaggagggcaagatgacggccaaggtcgtagagagcgccaaggccatcctgggcggaagcaaggtgcgcgtggaccaaaagtgcaagtcatcggcccagatcgacccaactcccgtgatcgtcacctccaacaccaacatgtgcgcggtcatcgacggaaactcgaccaccttcgagcaccaacaaccactccaggaccggatgttcaagttcgagctcaccaagcgcctggagcacgactttggcaaggtcaccaagcaggaagtcaaagactttttccggtgggcgtcagatcacgtgaccgaggtgactcacgagttttacgtcagaaagggtggagctagaaagaggcccgcccccaatgacgcagatataagtgagcccaagcgggcctgtccgtcagttgcgcagccatcgacgtcagacgcggaagctccggtggactacgcggacaggtaccaaaacaaatgttctcgtcacgtgggtatgaatctgatgctttttccctgccggcaatgcgagagaatgaatcagaatgtggacatttgcttcacgcacggggtcatggactgtgccgagtgcttccccgtgtcagaatctcaacccgtgtctgtcgtcagaaagcggacgtatcagaaactgtgtccgattcatcacatcatggggagggcgcccgaggtggcctgctcggcctgcgaactggccaatgtggacttggatgactgtgacatggaacaataa

SEQ ID NO: 56 - DNA, 1611 bp, Adeno-associated virus 4
atgccggggttctacgagatcgtgctgaaggtgcccagcgacctggacgagcacctgcccggcatttctgactcttttgtgagctgggtggccgagaaggaatgggagctgccgccggattctgacatggacttgaatctgattgagcaggcacccctgaccgtggccgaaaagctgcaacgcgagttcctggtcgagtggcgccgcgtgagtaaggccccggaggccctcttctttgtccagttcgagaagggggacagctacttccacctgcacatcctggtggagaccgtgggcgtcaaatccatggtggtgggccgctacgtgagccagattaaagagaagctggtgacccgcatctaccgcggggtcgagccgcagcttccgaactggttcgcggtgaccaagacgcgtaatggcgccggaggcgggaacaaggtggtggacgactgctacatccccaactacctgctccccaagacccagcccgagctccagtgggcgtggactaacatggaccagtatataagcgcctgtttgaatctcgcggagcgtaaacggctggtggcgcagcatctgacgcacgtgtcgcagacgcaggagcagaacaaggaaaaccagaaccccaattctgacgcgccggtcatcaggtcaaaaacctccgccaggtacatggagctggtcgggtggctggtggaccgcgggatcacgtcagaaaagcaatggatccaggaggaccaggcgtcctacatctccttcaacgccgcctccaactcgcggtcacaaatcaaggccgcgctggacaatgcctccaaaatcatgagcctgacaaagacggctccggactacctggtgggccagaacccgccggaggacatttccagcaaccgcatctaccgaatcctcgagatgaacgggtacgatccgcagtacgcggcctccgtcttcctgggctgggcgcaaaagaagttcgggaagaggaacaccatctggctctttgggccggccacgacgggtaaaaccaacatcgcggaagccatcgcccacgccgtgcccttctacggctgcgtgaactggaccaatgagaactttccgttcaacgattgcgtcgacaagatggtgatctggtgggaggagggcaagatgacggccaaggtcgtagagagcgccaaggccatcctgggcggaagcaaggtgcgcgtggaccaaaagtgcaagtcatcggcccagatcgacccaactcccgtgatcgtcacctccaacaccaacatgtgcgcggtcatcgacggaaactcgaccaccttcgagcaccaacaaccactccaggaccggatgttcaagttcgagctcaccaagcgcctggagcacgactttggcaaggtcaccaagcaggaagtcaaagactttttccggtgggcgtcagatcacgtgaccgaggtgactcacgagttttacgtcagaaagggtggagctagaaagaggcccgcccccaatgacgcagatataagtgagcccaagcgggcctgtccgtcagttgcgcagccatcgacgtcagacgcggaagctccggtggactacgcggacagattggctagaggacaacctctctga

SEQ ID NO: 57 - DNA, 1872 bp, Adeno-associated virus 4; identical to SEQ ID NO: 55

SEQ ID NO: 58 - DNA, 1617 bp, Adeno-associated virus 4
  modified_base (162)..(162): a, c, t, or g
atgcgtgcagcagctggcggagctgcagtcgagggsggacaaggtgccgatggagtgggtaatgcctcgggtgattggcattgcgattccacctggtctgagggccacgtcacgaccaccagcaccagaacctgggtcttgcccacctacaacaaccacctntacaagcgactcggagagagcctgcagtccaacacctacaacggattctccaccccctggggatactttgacttcaaccgcttccactgccacttctcaccacgtgactggcagcgactcatcaacaacaactggggcatgcgacccaaagccatgcgggtcaaaatcttcaacatccaggtcaaggaggtcacgacgtcgaacggcgagacaacggtggctaataaccttaccagcacggttcagatctttgcggactcgtcgtacgaactgccgtacgtgatggatgcgggtcaagagggcagcctgcctccttttcccaacgacgtctttatggtgccccagtacggctactgtggactggtgaccggcaacacttcgcagcaacagactgacagaaatgccttctactgcctggagtactttccttcgcagatgctgcggactggcaacaactttgaaattacgtacagttttgagaaggtgcctttccactcgatgtacgcgcacagccagagcctggaccggctgatgaaccctctcatcgaccagtacctgtggggactgcaatcgaccaccaccggaaccaccctgaatgccgggactgccaccaccaactttaccaagctgcggcctaccaacttttccaactttaaaaagaactggctgcccgggccttcaatcaagcagcagggcttctcaaagactgccaatcaaaactacaagatccctgccaccgggtcagacagtctcatcaaatacgagacgcacagcactctggacggaagatggagtgccctgacccccggacctccaatggccacggctggacctgcggacagcaagttcagcaacagccagctcatctttgcggggcctaaacagaacggcaacacggccaccgtacccgggactctgatcttcacctctgaggaggagctggcagccaccaacgccaccgatacggacatgtggggcaacctacctggcggtgaccagagcaacagcaacctgccgaccgtggacagactgacagccttgggagccgtgcctggaatggtctggcaaaacagagacatttactaccagggtcccatttgggccaagattcctcataccgatggacactttcacccctcaccgctgattggtgggtttgggctgaaacacccgcctcctcaaatttttatcaagaacaccccggtacctgcgaatcctgcaacgaccttcagctctactccggtaaactccttcattactcagtacagcactggccaggtgtcggtgcagattgactgggagatccagaaggagcggtccaaacgctggaaccccgaggtccagtttacctccaactacggacagcaaaactctctgttgtgggctcccgatgcggctgggaaatacactgagcctagggctatcggtacccgctacctcacccaccacctgtaa

SEQ ID NO: 59 - DNA, 939 bp, Adeno-associated virus 4
atggagctggtcgggtggctggtggaccgcgggatcacgtcagaaaagcaatggatccaggaggaccaggcgtcctacatctccttcaacgccgcctccaactcgcggtcacaaatcaaggccgcgctggacaatgcctccaaaatcatgagcctgacaaagacggctccggactacctggtgggccagaacccgccggaggacatttccagcaaccgcatctaccgaatcctcgagatgaacgggtacgatccgcagtacgcggcctccgtcttcctgggctgggcgcaaaagaagttcgggaagaggaacaccatctggctctttgggccggccacgacgggtaaaaccaacatcgcggaagccatcgcccacgccgtgcccttctacggctgcgtgaactggaccaatgagaactttccgttcaacgattgcgtcgacaagatggtgatctggtgggaggagggcaagatgacggccaaggtcgtagagagcgccaaggccatcctgggcggaagcaaggtgcgcgtggaccaaaagtgcaagtcatcggcccagatcgacccaactcccgtgatcgtcacctccaacaccaacatgtgcgcggtcatcgacggaaactcgaccaccttcgagcaccaacaaccactccaggaccggatgttcaagttcgagctcaccaagcgcctggagcacgactttggcaaggtcaccaagcaggaagtcaaagactttttccggtgggcgtcagatcacgtgaccgaggtgactcacgagttttacgtcagaaagggtggagctagaaagaggcccgcccccaatgacgcagatataagtgagcccaagcgggcctgtccgtcagttgcgcagccatcgacgtcagacgcggaagctccggtggactacgcggacagattggctagaggacaacctctctga

SEQ ID NO: 60 - DNA, 1197 bp, Adeno-associated virus 4
atggagctggtcgggtggctggtggaccgcgggatcacgtcagaaaagcaatggatccaggaggaccaggcgtcctacatctccttcaacgccgcctccaactcgcggtcacaaatcaaggccgcgctggacaatgcctccaaaatcatgagcctgacaaagacggctccggactacctggtgggccagaacccgccggaggacatttccagcaaccgcatctaccgaatcctcgagatgaacgggtacgatccgcagtacgcggcctccgtcttcctgggctgggcgcaaaagaagttcgggaagaggaacaccatctggctctttgggccggccacgacgggtaaaaccaacatcgcggaagccatcgcccacgccgtgcccttctacggctgcgtgaactggaccaatgagaactttccgttcaacgattgcgtcgacaagatggtgatctggtgggaggagggcaagatgacggccaaggtcgtagagagcgccaaggccatcctgggcggaagcaaggtgcgcgtggaccaaaagtgcaagtcatcggcccagatcgacccaactcccgtgatcgtcacctccaacaccaacatgtgcgcggtcatcgacggaaactcgaccaccttcgagcaccaacaaccactccaggaccggatgttcaagttcgagctcaccaagcgcctggagcacgactttggcaaggtcaccaagcaggaagtcaaagactttttccggtgggcgtcagatcacgtgaccgaggtgactcacgagttttacgtcagaaagggtggagctagaaagaggcccgcccccaatgacgcagatataagtgagcccaagcgggcctgtccgtcagttgcgcagccatcgacgtcagacgcggaagctccggtggactacgcggacaggtaccaaaacaaatgttctcgtcacgtgggtatgaatctgatgctttttccctgccggcaatgcgagagaatgaatcagaatgtggacatttgcttcacgcacggggtcatggactgtgccgagtgcttccccgtgtcagaatctcaacccgtgtctgtcgtcagaaagcggacgtatcagaaactgtgtccgattcatcacatcatggggagggcgcccgaggtggcctgctcggcctgcgaactggccaatgtggacttggatgactgtgacatggaacaa

SEQ ID NO: 61 - DNA, 245 bp, Adeno-associated virus 4
ctccatcatctaggtttgcccactgacgtcaatgtgacgtcctagggttagggaggtccctgtattagcagtcacgtgagtgtcgtatttcgcggagcgtagcggagcgcataccaagctgccacgtcacagccacgtggtccgtttgcgacagtttgcgacaccatgtggtcaggagggtatataaccgcgagtgagccagcgaggagctccattttgcccgcgaattttgaacgagcagcagc

SEQ ID NO: 62 - protein, 313 aa, Adeno-associated virus 4
  MOD_RES (313)..(313): Any amino acid
MELVGWLVDRGITSEKQWIQEDQASYISFNAASNSRSQIKAALDNASKIMSLTKTAPDYLVGQNPPEDISSNRIYRILEMNGYDPQYAASVFLGWAQKKFGKRNTIWLFGPATTGKTNIAEAIAHAVPFYGCVNWTNENFPFNDCVDKMVIWWEEGKMTAKVVESAKAILGGSKVRVDQKCKSSAQIDPTPVIVTSNTNMCAVIDGNSTTFEHQQPLQDRMFKFELTKRLEHDFGKVTKQEVKDFFRWASDHVTEVTHEFYVRKGGARKRPAPNDADISEPKRACPSVAQPSTSDAEAPVDYADRLARGQPLX

SEQ ID NO: 63 - protein, 399 aa, Adeno-associated virus 4
MELVGWLVDRGITSEKQWIQEDQASYISFNAASNSRSQIKAALDNASKIMSLTKTAPDYLVGQNPPEDISSNRIYRILEMNGYDPQYAASVFLGWAQKKFGKRNTIWLFGPATTGKTNIAEAIAHAVPFYGCVNWTNENFPFNDCVDKMVIWWEEGKMTAKVVESAKAILGGSKVRVDQKCKSSAQIDPTPVIVTSNTNMCAVIDGNSTTFEHQQPLQDRMFKFELTKRLEHDFGKVTKQEVKDFFRWASDHVTEVTHEFYVRKGGARKRPAPNDADISEPKRACPSVAQPSTSDAEAPVDYADRYQNKCSRHVGMNLMLFPCRQCERMNQNVDICFTHGVMDCAECFPVSESQPVSVVRKRTYQKLCPIHHIMGRAPEVACSACELANVDLDDCDMEQ

SEQ ID NO: 64 - protein, 623 aa, Adeno-associated virus 4
MPGFYEIVLKVPSDLDEHLPGISDSFVSWVAEKEWELPPDSDMDLNLIEQAPLTVAEKLQREFLVEWRRVSKAPEALFFVQFEKGDSYFHLHILVETVGVKSMVVGRYVSQIKEKLVTRIYRGVEPQLPNWFAVTKTRNGAGGGNKVVDDCYIPNYLLPKTQPELQWAWTNMDQYISACLNLAERKRLVAQHLTHVSQTQEQNKENQNPNSDAPVIRSKTSARYMELVGWLVDRGITSEKQWIQEDQASYISFNAASNSRSQIKAALDNASKIMSLTKTAPDYLVGQNPPEDISSNRIYRILEMNGYDPQYAASVFLGWAQKKFGKRNTIWLFGPATTGKTNIAEAIAHAVPFYGCVNWTNENFPFNDCVDKMVIWWEEGKMTAKVVESAKAILGGSKVRVDQKCKSSAQIDPTPVIVTSNTNMCAVIDGNSTTFEHQQPLQDRMFKFELTKRLEHDFGKVTKQEVKDFFRWASDHVTEVTHEFYVRKGGARKRPAPNDADISEPKRACPSVAQPSTSDAEAPVDYADRYQNKCSRHVGMNLMLFPCRQCERMNQNVDICFTHGVMDCAECFPVSESQPVSVVRKRTYQKLCPIHHIMGRAPEVACSACELANVDLDDCDMEQ

SEQ ID NO: 65 - protein, 537 aa, Adeno-associated virus 4
  MOD_RES (537)..(537): Any amino acid
MPGFYEIVLKVPSDLDEHLPGISDSFVSWVAEKEWELPPDSDMDLNLIEQAPLTVAEKLQREFLVEWRRVSKAPEALFFVQFEKGDSYFHLHILVETVGVKSMVVGRYVSQIKEKLVTRIYRGVEPQLPNWFAVTKTRNGAGGGNKVVDDCYIPNYLLPKTQPELQWAWTNMDQYISACLNLAERKRLVAQHLTHVSQTQEQNKENQNPNSDAPVIRSKTSARYMELVGWLVDRGITSEKQWIQEDQASYISFNAASNSRSQIKAALDNASKIMSLTKTAPDYLVGQNPPEDISSNRIYRILEMNGYDPQYAASVFLGWAQKKFGKRNTIWLFGPATTGKTNIAEAIAHAVPFYGCVNWTNENFPFNDCVDKMVIWWEEGKMTAKVVESAKAILGGSKVRVDQKCKSSAQIDPTPVIVTSNTNMCAVIDGNSTTFEHQQPLQDRMFKFELTKRLEHDFGKVTKQEVKDFFRWASDHVTEVTHEFYVRKGGARKRPAPNDADISEPKRACPSVAQPSTSDAEAPVDYADRLARGQPLX

SEQ ID NO: 66 - protein, 623 aa, Adeno-associated virus 4; identical to SEQ ID NO: 64

SEQ ID NO: 67 - protein, 544 aa, Adeno-associated virus 4
MSDDSEMRAAAGGAAVEGGQGADGVGNASGDWHCDSTWSEGHVTTTSTRTWVLPTYNNHLYKRLGESLQSNTYNGFSTPWGYFDFNRFHCHFSPRDWQRLINNNWGMRPKAMRVKIFNIQVKEVTTSNGETTVANNLTSTVQIFADSSYELPYVMDAGQEGSLPPFPNDVFMVPQYGYCGLVTGNTSQQQTDRNAFYCLEYFPSQMLRTGNNFEITYSFEKVPFHSMYAHSQSLDRLMNPLIDQYLWGLQSTTTGTTLNAGTATTNFTKLRPTNFSNFKKNWLPGPSIKQQGFSKTANQNYKIPATGSDSLIKYETHSTLDGRWSALTPGPPMATAGPADSKFSNSQLIFAGPKQNGNTATVPGTLIFTSEEELAATNATDTDMWGNLPGGDQSNSNLPTVDRLTALGAVPGMVWQNRDIYYQGPIWAKIPHTDGHFHPSPLIGGFGLKHPPPQIFIKNTPVPANPATTFSSTPVNSFITQYSTGQVSVQIDWEIQKERSKRWNPEVQFTSNYGQQNSLLWAPDAAGKYTEPRAIGTRYLTHHL

SEQ ID NO: 68 - protein, 734 aa, Adeno-associated virus 4
MTDGYLPDWLEDNLSEGVREWWALQPGAPKPKANQQHQDNARGLVLPGYKYLGPGNGLDKGEPVNAADAAALEHDKAYDQQLKAGDNPYLKYNHADAEFQQRLQGDTSFGGNLGRAVFQAKKRVLEPLGLVEQAGETAPGKKRPLIESPQQPDSSTGIGKKGKQPAKKKLVFEDETGAGDGPPEGSTSGAMSDDSEMRAAAGGAAVEGGQGADGVGNASGDWHCDSTWSEGHVTTTSTRTWVLPTYNNHLYKRLGESLQSNTYNGFSTPWGYFDFNRFHCHFSPRDWQRLINNNWGMRPKAMRVKIFNIQVKEVTTSNGETTVANNLTSTVQIFADSSYELPYVMDAGQEGSLPPFPNDVFMVPQYGYCGLVTGNTSQQQTDRNAFYCLEYFPSQMLRTGNNFEITYSFEKVPFHSMYAHSQSLDRLMNPLIDQYLWGLQSTTTGTTLNAGTATTNFTKLRPTNFSNFKKNWLPGPSIKQQGFSKTANQNYKIPATGSDSLIKYETHSTLDGRWSALTPGPPMATAGPADSKFSNSQLIFAGPKQNGNTATVPGTLIFTSEEELAATNATDTDMWGNLPGGDQSNSNLPTVDRLTALGAVPGMVWQNRDIYYQGPIWAKIPHTDGHFHPSPLIGGFGLKHPPPQIFIKNTPVPANPATTFSSTPVNSFITQYSTGQVSVQIDWEIQKERSKRWNPEVQFTSNYGQQNSLLWAPDAAGKYTEPRAIGTRYLTHHL

SEQ ID NO: 69 - protein, 598 aa, Adeno-associated virus 4
TAPGKKRPLIESPQQPDSSTGIGKKGKQPAKKKLVFEDETGAGDGPPEGSTSGAMSDDSEMRAAAGGAAVEGGQGADGVGNASGDWHCDSTWSEGHVTTTSTRTWVLPTYNNHLYKRLGESLQSNTYNGFSTPWGYFDFNRFHCHFSPRDWQRLINNNWGMRPKAMRVKIFNIQVKEVTTSNGETTVANNLTSTVQIFADSSYELPYVMDAGQEGSLPPFPNDVFMVPQYGYCGLVTGNTSQQQTDRNAFYCLEYFPSQMLRTGNNFEITYSFEKVPFHSMYAHSQSLDRLMNPLIDQYLWGLQSTTTGTTLNAGTATTNFTKLRPTNFSNFKKNWLPGPSIKQQGFSKTANQNYKIPATGSDSLIKYETHSTLDGRWSALTPGPPMATAGPADSKFSNSQLIFAGPKQNGNTATVPGTLIFTSEEELAATNATDTDMWGNLPGGDQSNSNLPTVDRLTALGAVPGMVWQNRDIYYQGPIWAKIPHTDGHFHPSPLIGGFGLKHPPPQIFIKNTPVPANPATTFSSTPVNSFITQYSTGQVSVQIDWEIQKERSKRWNPEVQFTSNYGQQNSLLWAPDAAGKYTEPRAIGTRYLTHHL

SEQ ID NO: 70 - DNA, 129 bp, Adeno-associated virus 4
ttggccactccctctatgcgcgctcgctcactcactcggccctgcggccagaggccggcagtctggagacctttggtgtccagggcagggccgagtgagtgagcgagcgcgcatagagggagtggccaa

SEQ ID NO: 71 - DNA, 125 bp, Adeno-associated virus 4
ttggccactccctctatgcgcgctcgctcactcactcggccctggagaccaaaggtctccagactgccggcctctggccggcagggccgagtgagtgagcgagcgcgcatagagggagtggccaa

SEQ ID NO: 72 - DNA, 4768 bp, Adeno-associated virus 4
  modified_base (3009)..(3009): a, c, t, or g
ttggccactccctctatgcgcgctcgctcactcactcggccctggagaccaaaggtctccagactgccggcctctggccggcagggccgagtgagtgagcgagcgcgcatagagggagtggccaactccatcatctaggtttgcccactgacgtcaatgtgacgtcctagggttagggaggtccctgtattagcagtcacgtgagtgtcgtatttcgcggagcgtagcggagcgcataccaagctgccacgtcacagccacgtggtccgtttgcgacagtttgcgacaccatgtggtcaggagggtatataaccgcgagtgagccagcgaggagctccattttgcccgcgaattttgaacgagcagcagccatgccggggttctacgagatcgtgctgaaggtgcccagcgacctggacgagcacctgcccggcatttctgactcttttgtgagctgggtggccgagaaggaatgggagctgccgccggattctgacatggacttgaatctgattgagcaggcacccctgaccgtggccgaaaagctgcaacgcgagttcctggtcgagtggcgccgcgtgagtaaggccccggaggccctcttctttgtccagttcgagaagggggacagctacttccacctgcacatcctggtggagaccgtgggcgtcaaatccatggtggtgggccgctacgtgagccagattaaagagaagctggtgacccgcatctaccgcggggtcgagccgcagcttccgaactggttcgcggtgaccaagacgcgtaatggcgccggaggcgggaacaaggtggtggacgactgctacatccccaactacctgctccccaagacccagcccgagctccagtgggcgtggactaacatggaccagtatataagcgcctgtttgaatctcgcggagcgtaaacggctggtggcgcagcatctgacgcacgtgtcgcagacgcaggagcagaacaaggaaaaccagaaccccaattctgacgcgccggtcatcaggtcaaaaacctccgccaggtacatggagctggtcgggtggctggtggaccgcgggatcacgtcagaaaagcaatggatccaggaggaccaggcgtcctacatctccttcaacgccgcctccaactcgcggtcacaaatcaaggccgcgctggacaatgcctccaaaatcatgagcctgacaaagacggctccggactacctggtgggccagaacccgccggaggacatttccagcaaccgcatctaccgaatcctcgagatgaacgggtacgatccgcagtacgcggcctccgtcttcctgggctgggcgcaaaagaagttcgggaagaggaacaccatctggctctttgggccggccacgacgggtaaaaccaacatcgcggaagccatcgcccacgccgtgcccttctacggctgcgtgaactggaccaatgagaactttccgttcaacgattgcgtcgacaagatggtgatctggtgggaggagggcaagatgacggccaaggtcgtagagagcgccaaggccatcctgggcggaagcaaggtgcgcgtggaccaaaagtgcaagtcatcggcccagatcgacccaactcccgtgatcgtcacctccaacaccaacatgtgcgcggtcatcgacggaaactcgaccaccttcgagcaccaacaaccactccaggaccggatgttcaagttcgagctcaccaagcgcctggagcacgactttggcaaggtcaccaagcaggaagtcaaagactttttccggtgggcgtcagatcacgtgaccgaggtgactcacgagttttacgtcagaaagggtggagctagaaagaggcccgcccccaatgacgcagatataagtgagcccaagcgggcctgtccgtcagttgcgcagccatcgacgtcagacgcggaagctccggtggactacgcggacaggtaccaaaacaaatgttctcgtcacgtgggtatgaatctgatgctttttccctgccggcaatgcgagagaatgaatcagaatgtggacatttgcttcacgcacggggtcatggactgtgccgagtgcttccccgtgtcagaatctcaacccgtgtctgtcgtcagaaagcggacgtatcagaaactgtgtccgattcatcacatcatggggagggcgcccgaggtggcctgctcggcctgcgaactggccaatgtggacttggatgactgtgacatggaacaataaatgactcaaaccagatatgactgacggttaccttccagattggctagaggacaacctctctgaaggcgttcgagagtggtgggcgctgcaacctggagcccctaaacccaaggcaaatcaacaacatcaggacaacgctcggggtcttgtgcttccgggttacaaatacctcggacccggcaacggactcgacaagggggaacccgtcaacgcagcggacgcggcagccctcgagcacgacaaggcctacgaccagcagctcaaggccggtgacaacccctacctcaagtacaaccacgccgacgcggagttccagcagcggcttcagggcgacacaccgtttgggggcaacctcggcagagcagtcttccaggccaaaaagagggttcttgaacctcttggtctggttgagcaagcgggtgagacggctcctggaaagaagagaccgttgattgaatccccccagcagcccgactcctccacgggtatcggcaaaaaaggcaagcagccggctaaaaagaagctcgttttcgaagacgaaactggagcaggcgacggaccccctgagggatcaacttccggagccatgtctgatgacagtgagatgcgtgcagcagctggcggagctgcagtcgagggsggacaaggtgccgatggagtgggtaatgcctcgggtgattggcattgcgattccacctggtctgagggccacgtcacgaccaccagcaccagaacctgggtcttgcccacctacaacaaccacctntacaagcgactcggagagagcctgcagtccaacacctacaacggattctccaccccctggggatactttgacttcaaccgcttccactgccacttctcaccacgtgactggcagcgactcatcaacaacaactggggcatgcgacccaaagccatgcgggtcaaaatcttcaacatccaggtcaaggaggtcacgacgtcgaacggcgagacaacggtggctaataaccttaccagcacggttcagatctttgcggactcgtcgtacgaactgccgtacgtgatggatgcgggtcaagagggcagcctgcctccttttcccaacgacgtctttatggtgccccagtacggctactgtggactggtgaccggcaacacttcgcagcaacagactgacagaaatgccttctactgcctggagtactttccttcgcagatgctgcggactggcaacaactttgaaattacgtacagttttgagaaggtgcctttccactcgatgtacgcgcacagccagagcctggaccggctgatgaaccctctcatcgaccagtacctgtggggactgcaatcgaccaccaccggaaccaccctgaatgccgggactgccaccaccaactttaccaagctgcggcctaccaacttttccaactttaaaaagaactggctgcccgggccttcaatcaagcagcagggcttctcaaagactgccaatcaaaactacaagatccctgccaccgggtcagacagtctcatcaaatacgagacgcacagcactctggacggaagatggagtgccctgacccccggacctccaatggccacggctggacctgcggacagcaagttcagcaacagccagctcatctttgcggggcctaaacagaacggcaacacggccaccgtacccgggactctgatcttcacctctgaggaggagctggcagccaccaacgccaccgatacggacatgtggggcaacctacctggcggtgaccagagcaacagcaacctgccgaccgtggacagactgacagccttgggagccgtgcctggaatggtctggcaaaacagagacatttactaccagggtcccatttgggccaagattcctcataccgatggacactttcacccctcaccgctgattggtgggtttgggctgaaacacccgcctcctcaaatttttatcaagaacaccccggtacctgcgaatcctgcaacgaccttcagctctactccggtaaactccttcattactcagtacagcactggccaggtgtcggtgcagattgactgggagatccagaaggagcggtccaaacgctggaaccccgaggtccagtttacctccaactacggacagcaaaactctctgttgtgggctcccgatgcggctgggaaatacactgagcctagggctatcggtacccgctacctcacccaccacctgtaataacctgttaatcaataaaccggtttattcgtttcagttgaactttggtctccgtgtccttcttatcttatctcgtttccatggctactgcgtacataagcagcggcctgcggcgcttgcgcttcgcggtttacaactgccggttaatcagtaacttctggcaaaccatgatgatggagttggccactccctctatgcgcgctcgctcactcactcggccctggagaccaaaggtctccagactgccggcctctggccggcagggccgagtgagtgagcgagcgcgcatagagggagtggccaa

SEQ ID NO: 73 - DNA, 3098 bp, Artificial Sequence
  source: /note="Description of Artificial Sequence: Synthetic polynucleotide"
gaattcgccctttctacggctgcgtcaactggaccaatgagaactttcccttcaacgattgcgtcgacaagatggtgatctggtgggaggagggcaagatgacggccaaggtcgtggagtccgccaaggccattctcggcggcagcaaggtgcgcgtggaccaaaagtgcaagtcttccgcccagatcgatcccacccccgtgatcgtcacttccaacaccaacatgtgcgctgtgattgacgggaacagcaccaccttcgagcaccagcagccgttacaagaccggatgttcaaatttgaactcacccgccgtctggagcacgactttggcaaggtgacaaagcaggaagtcaaagagttcttccgctgggcgcaggatcacgtgaccgaggtggcgcatgagttctacgtcagaaagggtggagccaacaagagacccgcccccgatgacgcggataaaagcgagcccaagcgggcctgcccctcagtcgcggatccatcgacgtcagacgcggaaggagctccggtggactttgccgacaggtaccaaaacaaatgttctcgtcacgcgggcatgcttcagatgctgtttccctgcaagacatgcgagagaatgaatcagaatttcaacatttgcttcacgcacgggaccagagactgttcagaatgtttccccggcgtgtcagaatctcaaccggtcgtcagaaagaggacgtatcggaaactctgtgccattcatcatctgctggggcgggctcccgagattgcttgctcggcctgcgatctggtcaacgtggacctggatgaccgtgtttctgagcaataaatgacttaaaccaggtatggctgccgatggttatcttccagattggctcgaggacaacctctctgagggcattcgcgagtggtgggacttgaaacctggagccccgaaacccaaagccaaccagcaaaagcaggacgacggccggggtctggtgcttcctggctacaagtacctcggacccttcaacggactcgacaagggagagccggtcaacgaggcagacgccgcggccctcgagcacgacaaggcctacgacaagcagctcgagcagggggacaacccgtacctcaagtacaaccacgccgacgccgagtttcaggagcgtcttcaagaagatacgtcttttgggggcaacctcgggcgagcagtcttccaggccaagaagcgggttctcgaacctctcggtctggttgaggaaggcgctaagacggctcctggaaagaagagacccatagaatcccccgactcctccacgggcatcggcaagaaaggccagcagcccgctaaaaagaagctcaactttgggcagactggcgactcagagtcagtgcccgacccccaacctctcggagaacctcccgccgcgccctcaggtctgggatctggtacaatggctgcaggcggtggcgcaccaatggcagacaataacgaaggcgccgacggagtgggtaatgcctccggaaattggcattgcgattccacatggctgggcgacagagtcatcaccaccagcacccgcacctgggccctgcccacctacaacaaccacctctacaagcagatatcaagtcagagcggggctaccaacgacaaccacttcttcggctacagcaccccctggggctattttgacttcaacagattccactgccacttctcaccacgtgactggcagcgactcatcaacaacaactggggattccggcccagaaagctgcggttcaagttgttcaacatccaggtcaaggaggtcacgacgaacgacggcgttacgaccatcgctaataaccttaccagcacgattcaggtcttctcggactcggagtaccaactgccgtacgtcctcggctctgcgcaccagggctgcctccctccgttccctgcggacgtgttcatgattcctcagtacggatatctgactctaaacaacggcagtcagtctgtgggacgttcctccttctactgcctggagtactttccttctcagatgctgagaacgggcaataactttgaattcagctacacctttgaggaagtgcctttccacagcagctatgcgcacagccagagcctggaccggctgatgaatcccctcatcgaccagtacctgtactacctggcccggacccagagcactacggggtccacaagggagctgcagttccatcaggctgggcccaacaccatggccgagcaatcaaagaactggctgcccggaccctgttatcggcagcagagactgtcaaaaaacatagacagcaacaacaacagtaactttgcctggaccggggccactaaataccatctgaatggtagaaattcattaaccaacccgggcgtagccatggccaccaacaaggacgacgaggaccagttctttcccatcaacggagtgctggtttttggcgaaacgggggctgccaacaagacaacgctggaaaacgtgctaatgaccagcgaggaggagatcaaaaccaccaatcccgtggctacagaagaatacggtgtggtctccagcaacctgcaatcgtctacggccggaccccagacacagactgtcaacagccagggggctctgcccggcatggtctggcagaaccgggacgtgtacctgcagggtcccatctgggccaaaattcctcacacggacggcaactttcacccgtctcccctgatgggcggatttggactcaaacacccgcctcctcaaattctcatcaaaaacaccccggtacctgctaatcctccagaggtgtttactcctgccaagtttgcctcatttatcacgcagtacagcaccggccaggtcagcgtggagatcgagtgggaactgcagaaagaaaacagcaaacgctggaatccagagattcagtacacctcaaattatgccaagtctaataatgtggaatttgctgtcaacaacgaaggggtttatactgagcctcgccccattggcacccgttacctcacccgtaacctgtaattgcctgttaatcaataaaccggttaattcgtttcagttgaactttggtctctgcgaagggcgaattc

SEQ ID NO: 74 - protein, 728 aa, Artificial Sequence
  source: /note="Description of Artificial Sequence: Synthetic polypeptide"
MAADGYLPDWLEDNLSEGIREWWDLKPGAPKPKANQQKQDDGRGLVLPGYKYLGPFNGLDKGEPVNEADAAALEHDKAYDKQLEQGDNPYLKYNHADAEFQERLQEDTSFGGNLGRAVFQAKKRVLEPLGLVEEGAKTAPGKKRPIESPDSSTGIGKKGQQPAKKKLNFGQTGDSESVPDPQPLGEPPAAPSGLGSGTMAAGGGAPMADNNEGADGVGNASGNWHCDSTWLGDRVITTSTRTWALPTYNNHLYKQISSQSGATNDNHFFGYSTPWGYFDFNRFHCHFSPRDWQRLINNNWGFRPRKLRFKLFNIQVKEVTTNDGVTTIANNLTSTIQVFSDSEYQLPYVLGSAHQGCLPPFPADVFMIPQYGYLTLNNGSQSVGRSSFYCLEYFPSQMLRTGNNFEFSYTFEEVPFHSSYAHSQSLDRLMNPLIDQYLYYLARTQSTTGSTRELQFHQAGPNTMAEQSKNWLPGPCYRQQRLSKNIDSNNNSNFAWTGATKYHLNGRNSLTNPGVAMATNKDDEDQFFPINGVLVFGETGAANKTTLENVLMTSEEEIKTTNPVATEEYGVVSSNLQSSTAGPQTQTVNSQGALPGMVWQNRDVYLQGPIWAKIPHTDGNFHPSPLMGGFGLKHPPPQILIKNTPVPANPPEVFTPAKFASFITQYSTGQVSVEIEWELQKENSKRWNPEIQYTSNYAKSNNVEFAVNNEGVYTEPRPIGTRYLTRNL

SEQ ID NO: 75 - DNA, 2495 bp, Artificial Sequence
  source: /note="Description of Artificial Sequence: Synthetic polynucleotide"
gaattcgccctttctacggctgcgtcaactagaccaatgagaactttcccttcaacgattgcgtcgacaagatggtgatctggtgggaggagggcaagatgacggccaaggtcgtggagtccgccaaggccattcatcatctgctggggcgggctcccgagattgcttgctcggcctgcgatctggtcaacgtggacctggatgactgtgtttctgagcaataaatgacttaaaccaggtatggctgccgatggttatcttccagattggctcgaggacaacctctctgagggcattcgcgagtggtgggacttgaaacctggagccccgaaacccaaagccaaccagcaaaagcaggacgacggccggggtctggtgcttcctggctacaagtacctcggacccttcaacggactcgacaagggagagccggtcaacgaggcagacgccgcggccctcgagcacgacaaggcctacgacaagcagctcgagcagggggacaacccgtacctcaagtacaaccacgccgacgccgagtttcaggagcgtcttcaagaagatacgtcttttgggggcaacctcgggcgagcagtcttccaggccaagaagcgggttctcgaacctctcggtctggttgaggaaggcgctaagacggctcctggaaagaagagacccatagaatcccccgactcctccacgggcatcggcaagaaaggccagcagcccgctaaaaagaagctcaactttgggcagactggcgactcagagtcagtgcccgaccctcaaccaatcggagaaccccccgcaggcccctctggtctgggatctggtacaatggctgcaggcggtggcgctccaatggcagacaataacgaaggcgccgacggagtgggtaatgcctccggaaattggcattgcgattccacatggctgggcgacagagtcatcaccaccagcacccgcacctgggccctgcccacctacaacaaccacctctacaagcagatatcaagtcagagcggggctaccaacgacaaccacttcttcggctacagcaccccctggggctattttgacttcaacagattccactgccacttctcaccacgtgactggcagcgactcatcaacaacaactggggattccggcccagaaagctgcggttcaagttgttcaacatccaggtcaaggaggtcacgacgaacgacggcgttacgaccatcgctaataaccttaccagcacgattcaggtcttctcggactcggagtaccaactgccgtacgtcctcggctctgcgcaccagggctgcctccctccgttccctgcggacgtgttcatgattcctcagtacggatatctgactctaaacaacggcagtcagtctgtgggacgttcctccttctactgcctggagtactttccttctcagatgctgagaacgggcaataactttgaattcagctacacctttgaggaagtgcctttccacagcagctatgcgcacagccagagcctggaccggctgatgaatcccctcatcgaccagtacctgtactacctggcccggacccagagcactacggggtccacaagggagctgcagttccatcaggctgggcccaacaccatggccgagcaatcaaagaactggctgcccggaccctgttatcggcagcagagactgtcaaaaaacatagacagcaacaacaccagtaactttgcctggaccggggccactaaataccatctgaatggtagaaattcattaaccaacccgggcgtagccatggccaccaacaaggacgacgaggaccagttctttcccatcaacggagtgctggtttttggcaaaacgggggctgccaacaagacaacgctggaaaacgtgctaatgaccagcgaggaggagatcaaaaccaccaatcccgtggctacagaacagtacggtgtggtctccagcaacctgcaatcgtctacggccggaccccagacacagactgtcaacagccagggggctctgcccggcatggtctggcagaaccgggacgtgtacctgcagggtcccatctgggccaaaattcctcacacggacggcaactttcacccgtctcccctgatgggcggatttggactcaaacacccgcctcctcaaattctcatcaaaaacaccccggtacctgctaatcctccagaggtgtttactcctgccaagtttgcctcatttatcacgcagtacagcaccggccaggtcagcgtggagatcgagtgggaactgcagaaagaaaacagcaaacgctggaatccagagattcagtacacctcaaattatgccaagtctaataatgtggaatttgctgtcaacaacgaaggggtttatactgagcctcgccccattggcacccgttacctcacccgtaacctgtaattgcctgttaatcaataaaccggttaattcgtttcagttgaactttggtctctgcgaagggcgaattc

SEQ ID NO: 76 - protein, 728 aa, Artificial Sequence
  source: /note="Description of Artificial Sequence: Synthetic polypeptide"
MAADGYLPDWLEDNLSEGIREWWDLKPGAPKPKANQQKQDDGRGLVLPGYKYLGPFNGLDKGEPVNEADAAALEHDKAYDKQLEQGDNPYLKYNHADAEFQERLQEDTSFGGNLGRAVFQAKKRVLEPLGLVEEGAKTAPGKKRPIESPDSSTGIGKKGQQPAKKKLNFGQTGDSESVPDPQPIGEPPAGPSGLGSGTMAAGGGAPMADNNEGADGVGNASGNWHCDSTWLGDRVITTSTRTWALPTYNNHLYKQISSQSGATNDNHFFGYSTPWGYFDFNRFHCHFSPRDWQRLINNNWGFRPRKLRFKLFNIQVKEVTTNDGVTTIANNLTSTIQVFSDSEYQLPYVLGSAHQGCLPPFPADVFMIPQYGYLTLNNGSQSVGRSSFYCLEYFPSQMLRTGNNFEFSYTFEEVPFHSSYAHSQSLDRLMNPLIDQYLYYLARTQSTTGSTRELQFHQAGPNTMAEQSKNWLPGPCYRQQRLSKNIDSNNTSNFAWTGATKYHLNGRNSLTNPGVAMATNKDDEDQFFPINGVLVFGKTGAANKTTLENVLMTSEEEIKTTNPVATEQYGVVSSNLQSSTAGPQTQTVNSQGALPGMVWQNRDVYLQGPIWAKIPHTDGNFHPSPLMGGFGLKHPPPQILIKNTPVPANPPEVFTPAKFASFITQYSTGQVSVEIEWELQKENSKRWNPEIQYTSNYAKSNNVEFAVNNEGVYTEPRPIGTRYLTRNL

SEQ ID NO: 77 - DNA, 2504 bp, Artificial Sequence
  source: /note="Description of Artificial Sequence: Synthetic polynucleotide"
gaattcgccctttctacggctgcgtcaactggaccaatgagaactttcccttcaacgattgcgtcgacaagatggtgatctggtgggaggagggcaagatgacggccaaggtcgtggagtccgccaaggccattcatcatctgctggggcgggctcccgagattgcttgctcggcctgcgatctggtcaacgtggacctggatgactgtgtttctgagcaataaatgacttaaaccaggtatggctgccgatggttatcttccagattggctcgaggacaacctctctgagggcattcgcgagtggtgggacttgaaacctggagccccgaaacccaaagccaaccagcaaaagcaggacgacggccggggtctggtgcttcctggctacaagtacctcggacccttcaacggactcgacaagggagagccggtcaacgaggcagacgccgcggccctcgagcacgacaaggcctacgacaagcagctcgagcagggggacaacccgtacctcaagtacaaccacgccgacgccgagtttcaggagcgtcttcaagaagatacgtcttttgggggcaacctcgggcgagcagtcttccaggccaagaagcgggttctcgaacctctcggtctggttgaggaaggcgctaagacggctcctggaaagaagagacccatagaatcccccgactcctccacgggcatcggcaagaaaggccagcagcccgctaaaaagaagctcaactttgggcagactggcgactcagagtcagtgcccgaccctcaaccaatcggagaaccccccgcaggcccctctggtctgggatctggtacaatggctgcaggcggtggcgctccaatggcagacaataacgaaggcgccgacggagtgggtaatgcctccggaaattggcattgcgattccacatggctgggcgacagagtcatcaccaccagcacccgcacctgggccctgcccacctacaacaaccacctctacaagcagatatcaagtcagagcggggctaccaacgacaaccacttcttcggctacagcaccccctggggctattttgacttcaacagattccactgccacttctcatcacgtgactggcagcgactcatcaacaacaactggggattccggcccaagagactcaacttcaagctcttcaacatccaggtcaaggaggtcacgcagaatgaaggcaccaagaccatcgccaataaccttaccagcacgattcaggtctttacggactcggaataccggctcccgtacgtcctcggctctgcgcaccagggctgcctgcctccgttcccggcggacgtcttcatgattcctcagtacgggtacctgactctgaacaacggcagtcaggccgtgggccgttcctccttctactgcctggagtactttccttctcaaatgctgagaacgggcaacaactttgagttcagctaccagtttgaggacgtgccttttcacagcagctacgcgcacagccaaagcctggaccggctgatgaaccccctcatcgaccagtacctgtactacctgtctcggactcagtccacgggaggtaccgcaggaactcagcagttgctattttctcaggccgggcctaataacatgtcggctcaggccaaaaactggctacccgggccctgctaccggcagcaacgcgtctccacgacactgtcgcaaaataacaacagcaactttgcttggaccggtgccaccaagtatcatctgaatggcagagactctctggtaaatcccggtgtcgctatggcaacgcacaaggacgacgaagagcgattttttccatccagcggagtcttgatgtttgggaaacagggagctggaaaagacaacgtggactatagcagcgttatgctaaccagtgaggaagaaatcaaaaccaccaacccagtggccacagaacagtacggcgtggtggccgataacctgcaacagcaaaacgccgctcctattgtaggggccgtcaacagtcaaggagccttacctggcatggtctggcagaaccgggacgtgtacctgcagggtcctatctgggccaagattcctcacacggacggcaactttcatccttcgccgctgatgggaggctttggactgaaacacccgcctcctcagatcctgattaagaatacacctgttcccgcggatcctccaactaccttcagtcaagccaagccggcgtcgttcatcacgcagtacagcaccggacaggtcagcgtggaaattgaatgggagctgcagaaagagaacagcaagcgctggaacccagagattcagtatacttccaactactacaaatctacaaatgtggactttgctgtcaatactgagggtacttattcagagcctcgccccattggcacccgttacctcacccgtaacctgtaattgcctgttaatcaataaaccggttaattcgtttcagttgaactttggtctctgcgaagggcgaattc

SEQ ID NO: 78 - protein, 731 aa, Artificial Sequence
  source: /note="Description of Artificial Sequence: Synthetic polypeptide"
MAADGYLPDWLEDNLSEGIREWWDLKPGAPKPKANQQKQDDGRGLVLPGYKYLGPFNGLDKGEPVNEADAAALEHDKAYDKQLEQGDNPYLKYNHADAEFQERLQEDTSFGGNLGRAVFQAKKRVLEPLGLVEEGAKTAPGKKRPIESPDSSTGIGKKGQQPAKKKLNFGQTGDSESVPDPQPIGEPPAGPSGLGSGTMAAGGGAPMADNNEGADGVGNASGNWHCDSTWLGDRVITTSTRTWALPTYNNHLYKQISSQSGATNDNHFFGYSTPWGYFDFNRFHCHFSSRDWQRLINNNWGFRPKRLNFKLFNIQVKEVTQNEGTKTIANNLTSTIQVFTDSEYRLPYVLGSAHQGCLPPFPADVFMIPQYGYLTLNNGSQAVGRSSFYCLEYFPSQMLRTGNNFEFSYQFEDVPFHSSYAHSQSLDRLMNPLIDQYLYYLSRTQSTGGTAGTQQLLFSQAGPNNMSAQAKNWLPGPCYRQQRVSTTLSQNNNSNFAWTGATKYHLNGRDSLVNPGVAMATHKDDEERFFPSSGVLMFGKQGAGKDNVDYSSVMLTSEEEIKTTNPVATEQYGVVADNLQQQNAAPIVGAVNSQGALPGMVWQNRDVYLQGPIWAKIPHTDGNFHPSPLMGGFGLKHPPPQILIKNTPVPADPPTTFSQAKPASFITQYSTGQVSVEIEWELQKENSKRWNPEIQYTSNYYKSTNVDFAVNTEGTYSEPRPIGTRYLTRNL

SEQ ID NO: 79 - DNA, 3128 bp, Artificial Sequence
  source: /note="Description of Artificial Sequence: Synthetic polynucleotide"
gaattcgccctttctacggctgcgtcaactggaccaatgagaactttcccttcaacgattgcgtcgacaagatggtgatctggtgggaggagggcaagatgacggccaaggtcgtggagtccgccaaggccattctcggcggcagcaaggtgcgcgtggaccaaaagtgcaagtcttccgcccagatcgatcccacccccgtgatcgtcacttccaacaccaacatgtgcgccgtgattgacgggaacagcaccaccttcgagcaccagcagccgttacaagaccggatgttcaaatttgaactcacccgccgtctggagcacgactttggcaaggtgacaaagcaggaagtcaaagagttcttccgctgggcgcaggatcacgtgaccgaggtggcgcatgagttctacgtcagaaagggtggagccaacaagagacccgcccccgatgacgcggataaaagcgagcccaagcgggcctgcccctcagtcgcggatccatcgacgtcagacgcggaaggagctccggtggactttgccgacaggtaccaaaacaaatgttctcgtcacgcgggcatgcttcagatgctgtttccctgcaagacatgcgagagaatgaatcagaatttcaacatttgcttcacgcacgggaccagagactgttcagaatgtttccccggcgtgtcagaatctcaaccggtcgtcagaaagaggacgtatcggaaactctgtgccattcatcatctgctagggcgggctcccgagattgcttgctcggcctgcgatctggtcaacgtggacctggatgactgtgtttctgagcaataaatgacttaaaccaggtatggctgccgatggttatcttccagattggctcgaggacaacctctctgagggcattcgcgagtggtgggacttgaaacctggagccccgaaacccaaagccaaccagcaaaagcaggacgacggccggggtctggtgcttcctggctacaagtacctcggacccttcaacggactcgacaagggggagcccgtcaacgcggcggacgcagcggccctcgagcacgacaaggcctacgaccagcagctcaaagcgggtgacaatccgtacctgcggtataaccacgccgacgccgagtttcaggagcgtctgcaagaagatacgtcttttgggggcaacctcgggcgagcagtcttccaggccaagaagcgggttctcgaacctctcggtctggttgaggaaggcgctaagacggctcctggaaagaagagaccggtagagccatcaccccagcgttctccagactcctctacgggcatcggcaagacaggccagcagcccgcgaaaaagagactcaactttgggcagactggcgactcagagtcagtgcccgaccctcaaccaatcggagaaccccccgcaggcccctctggtctgggatctggtacaatggctgcaggcggtggcgctccaatggcagacaataacgaaggcgccgacggagtgggtagttcctcaggaaattggcattgcgattccacatggctgggcgacagagtcatcaccaccagcacccgaacctgggccctccccacctacaacaaccacctctacaagcaaatctccaacgggacatcgggaggaagcaccaacgacaacacctacttcggctacagcaccccctgggggtattttgactttaacagattccactgccacttctcaccacgtgactggcagcgactcatcaacaacaactggggattccggcccaagagactcaacttcaagctcttcaacatccaggtcaaggaggtcacgcagaatgaaggcaccaagaccatcgccaataaccttaccagcacgattcaggtctttacggactcggaataccagctcccgtacgtcctcggctctgcgcaccagggctgcctgcctccgttcccggcggacgtcttcatgattcctcagtacgggtacctgactctgaacaacggcagtcaggccgtgggccgttcctccttctactgcctggagtactttccttctcaaatgctgagaacgggcaacaactttgagttcagctaccagtttgaggacgtgccttttcacagcagctacgcgcacagccaaagcctggaccggctgatgaaccccctcatcgaccagtacctgtactacctgtctcggactcagtccacgggaggtaccgcaggaactcagcagttgctattttctcaggccgggcctaataacatgtcggctcaggccaaaaactggctacccgggccctgctaccggcagcaacgcgtctccacgacactgtcgcaaaataacaacagcaactttgcttggaccggtgccaccaagtatcatctgaatggcagagactctctggtaaatcccggtgtcgctatggcaacgcacaaggacgacgaagagcgattttttccatccagcggagtcttgatgtttgggaaacagggagctggaaaagacaacgtggactatagcagcgttatgctaaccagtgaggaagaaatcaaaaccaccaacccagtggccacagaacagtacggcgtggtggccgataacctgcaacagcaaaacgccgctcctattgtaggggccgtcaacagtcaaggagccttacctggcatggtctggcagaaccgggacgtgtacctgcagggtcctatctgggccaagattcctcacacggacggcaactttcatccttcgccgctgatgggaggctttggactgaaacacccgcctcctcagatcctgattaagaatacacctgttcccgcggatcctccaactaccttcagtcaagccaagctggcgtcgttcatcacgcagtacagcaccggacaggtcagcgtggaaattgaatgggagctgcagaaagagaacagcaagcgctggaacccagagattcagtatacttccaactactacaaatctacaaatgtggactttgctgtcaatactgagggtacttattcagagcctcgccccattggcacccgttacctcacccgtaacctgtaattgcctgttaatcaataaaccggctaattcgtttcagttgaactttggtctctgcgaagggcgaattc

SEQ ID NO: 80 - protein, 738 aa, Artificial Sequence
  source: /note="Description of Artificial Sequence: Synthetic polypeptide"
MAADGYLPDWLEDNLSEGIREWWDLKPGAPKPKANQQKQDDGRGLVLPGYKYLGPFNGLDKGEPVNAADAAALEHDKAYDQQLKAGDNPYLRYNHADAEFQERLQEDTSFGGNLGRAVFQAKKRVLEPLGLVEEGAKTAPGKKRPVEPSPQRSPDSSTGIGKTGQQPAKKRLNFGQTGDSESVPDPQPIGEPPAGPSGLGSGTMAAGGGAPMADNNEGADGVGSSSGNWHCDSTWLGDRVITTSTRTWALPTYNNHLYKQISNGTSGGSTNDNTYFGYSTPWGYFDFNRFHCHFSPRDWQRLINNNWGFRPKRLNFKLFNIQVKEVTQNEGTKTIANNLTSTIQVFTDSEYQLPYVLGSAHQGCLPPFPADVFMIPQYGYLTLNNGSQAVGRSSFYCLEYFPSQMLRTGNNFEFSYQFEDVPFHSSYAHSQSLDRLMNPLIDQYLYYLSRTQSTGGTAGTQQLLFSQAGPNNMSAQAKNWLPGPCYRQQRVSTTLSQNNNSNFAWTGATKYHLNGRDSLVNPGVAMATHKDDEERFFPSSGVLMFGKQGAGKDNVDYSSVMLTSEEEIKTTNPVATEQYGVVADNLQQQNAAPIVGAVNSQGALPGMVWQNRDVYLQGPIWAKIPHTDGNFHPSPLMGGFGLKHPPPQILIKNTPVPADPPTTFSQAKLASFITQYSTGQVSVEIEWELQKENSKRWNPEIQYTSNYYKSTNVDFAVNTEGTYSEPRPIGTRYLTRNL

SEQ ID NO: 81 - DNA, 3084 bp, Artificial Sequence
  source: /note="Description of Artificial Sequence: Synthetic polynucleotide"
gaattcgccctttctacggctgcatcaactggaccaatgagaactttcccttcaacgattgcgtcgacaagatggtgatctggtgggaggagggcaagatgacggccaaggtcgtggagtccgccaaggccattctcggcggcagcaaggtgcgcgtggaccaaaagtgcaagtcgtccgcccagatcgaccccacccccgtgatcgtcacctccaacaccaacatgtgcgccgtgattgacgggaacagcaccaccttcgagcaccagcagccgttgcaggaccggatgttcaagttcgaactcacccgccgtctggagcacgactttggcaaggtgaccaagcaggaagtcaaagagttcttccgctgggcgcaggatcacgtgaccgaggtggcgcatgagttctacgtcagaaagggcggagccagcaaaagacccgcccccgatgacgcggatataagcgagcccaagcgggcctgcccctcagtcgcggatccatcgacgtcagacgcggaaggagctccggtggactttgccgacaggtaccaaaacaaatgttctcgtcacgcgggcatgcttcagatgctgtttccctgcaaaacgtgcgagaaaatgaatcagaatttcaacatttgcttcacgcacggggtcagagactgctcagaatgtttccccggtgcatcagaatctcaaccggtcgtcagaaaaaaaacgtatcagaaactgtgtgccattcatcatctgctggggcgggcacccgagattgcttgctcggcctgcgatctggtcaacgtggacctggacgactgtgtttctgagcaataaatgacttaaaccaggtatggctgccgatggttatcttccagattggcttgaggacaacctctctgagggcattcgcgagtggtgggacctgaaacctggagccccgaaacccaaagccaaccagcaaaagcaggacgacggccggggtctggtgcttcctggctacaagtacctcggacccttcaacggactcgacaagggggagcccgtcaacgcggcggacgcagcggccctcgagcacgacaaggcctacgaccagcagctcaaagcgggtgacaatccgtacctgcggtataaccacgccgacgccgagtttcaggagcgtctgcaagaagatacgtcttttgggggcaacctcgggcgagcagtcttccaggccaagaagcgggttctcgaacctctcggtctggttgaggaaggcgctaagacggctcctggaaagaagagaccggtagagccatcacctcagcgttcccccgactcctccacgggcatcggcaagaaaggccaccagcccgcgagaaagagactgaactttgggcagactggcgactcggagtcagtccccgaccctcaaccaatcggagaaccaccagcaggcccctctggtctgggatctggtacaatggctgcaggcggtggcgctccaatggcagacaataacgaaggcgccgacggagtgggtagttcctcaggaaattggcattgcgattccacatggctgggcgacagagtcatcaccaccagcacccgaacctgggccctgcccacctacaacaaccatctctacaagcaaatctccaacgggacatcgggaggaagcactaacgacaacacctactttggctacagcaccccctgggggtattttgacttcaacagattccactgccacttctcaccacgtgactggcagcgactcatcaacaataactggggattccggcccaagagactcaacttcaagctcttcaacatccaggtcaaggaggtcacgcagaatgaaggcaccaagaccatcgccaataaccttaccagcacgattcaggtgtttacggactcggaataccagctcccgtacgtccccggctctgcgcaccagggctgcctccctccgttcccggcggacgtcttcatgattcctcagtacgggtatctgaccctaaacaatggcagtcaggctgtgggccgttcctccttctactgcctggaatacttcccttctcaaatgctgaggacgggcaacaactttgaattcagctacaccttcgaggacgtgcctttccacagcagctacgcgcacagccagagcctggaccggctgatgaaccctctcatcgaccagtacctgtattacttatccagaactcagtccacaggaggaactcaaggtactcagcaattgttattttctcaagccgggcccgcaaacatgtcggctcaggccaagaactggctacctggaccgtgttaccgtcagcaacgagtttccacgacactgtcgcaaaacaacaacagcaattttgcttggaccggtgccaccaagtatcacctgaatggcagagactccctggttaatcccggcgttgccatggctacccacaaggacgacgaggagcgcttcttcccgtcaagcggagttctaatgtttggcaagcagggggctggaaaagacaatgtggactacagcagcgtgatgctcaccagcgaagaagaaattaaaactactaacccagtggctacagagcagtatggtgtggtggcagacaacctgcagcagaccaacggagctcccattgtgggaactgtcaacagccagggggccttacctggtatggtctggcaaaaccgggacgtgtacctgcagggccccatctgggccaaaattcctcacacggacggcaactttcatccttcgccgctgatgggaggctttggactgaaacacccgcctcctcagatcctggtgaaaaacactcctgttcctgcggatcctccgaccaccttcagccaggccaagctggcttcttttatcacgcagtacagcaccggacaggtcagcgtggaaatcgaatgggagctgcagaaagaaaacagcaagcgctggaacccagagattcagtatacttccaactactacaaatctacaaatgtggactttgctgtcaatactgagggtacttattcagagcctcgccccattggcactcgttatctcacccgtaatctgtaattgcttgttaatcaataaaccggt

SEQ ID NO: 82 - protein, 738 aa, Artificial Sequence
  source: /note="Description of Artificial Sequence: Synthetic polypeptide"
MAADGYLPDWLEDNLSEGIREWWDLKPGAPKPKANQQKQDDGRGLVLPGYKYLGPFNGLDKGEPVNAADAAALEHDKAYDQQLKAGDNPYLRYNHADAEFQERLQEDTSFGGNLGRAVFQAKKRVLEPLGLVEEGAKTAPGKKRPVEPSPQRSPDSSTGIGKKGHQPARKRLNFGQTGDSESVPDPQPIGEPPAGPSGLGSGTMAAGGGAPMADNNEGADGVGSSSGNWHCDSTWLGDRVITTSTRTWALPTYNNHLYKQISNGTSGGSTNDNTYFGYSTPWGYFDFNRFHCHFSPRDWQRLINNNWGFRPKRLNFKLFNIQVKEVTQNEGTKTIANNLTSTIQVFTDSEYQLPYVPGSAHQGCLPPFPADVFMIPQYGYLTLNNGSQAVGRSSFYCLEYFPSQMLRTGNNFEFSYTFEDVPFHSSYAHSQSLDRLMNPLIDQYLYYLSRTQSTGGTQGTQQLLFSQAGPANMSAQAKNWLPGPCYRQQRVSTTLSQNNNSNFAWTGATKYHLNGRDSLVNPGVAMATHKDDEERFFPSSGVLMFGKQGAGKDNVDYSSVMLTSEEEIKTTNPVATEQYGVVADNLQQTNGAPIVGTVNSQGALPGMVWQNRDVYLQGPIWAKIPHTDGNFHPSPLMGGFGLKHPPPQILVKNTPVPADPPTTFSQAKLASFITQYSTGQVSVEIEWELQKENSKRWNPEIQYTSNYYKSTNVDFAVNTEGTYSEPRPIGTRYLTRNL

SEQ ID NO: 83 - DNA, 3123 bp, Artificial Sequence
  source: /note="Description of Artificial Sequence: Synthetic polynucleotide"
gaattcgcccttggctgcgtcaactggaccaatgagaactttcccttcaacgattgcgtcgacaagatggtgatctggtgggaggagggcaagatgacggccaaggtcgtggagtccgccaaggccattctcggcggcagcaaggtgcgcgtggaccaaaagtgcaagtcgtccgcccagatcgaccccacccccgtgatcgtcacctccaacaccaacatgtgcgccgtgattgacgggaacagcaccaccttcgagcaccagcagccgttgcaggaccggatgttcaagttcgaactcacccgccgtctggagcacgactttggcaaggtgaccaagcaggaagtcaaagagttcttccgctgggcgcaggatcacgtgaccgaggtggcgcatgagttctacgtcagaaagggcggagccagcaaaagacccgcccccgatgacgcggatataagcgagcccaagcgggcctgcccctcagtcgcggatccatcgacgtcagacgcggaaggagctccggtggactttgccgacaggtaccaaaacaaatgttctcgtcacgcgggcatgctccagatgctgtttccctgcaaaacgtgcgagagaatgaatcagaatttcaacatttgcttcacgcacggggtcagagactgctcagaatgtttccccggtgcatcagaatctcaaccggtcgtcagaaaaaaaacgtatcagaaactgtgtgccattcatcatctgctggggcgggcacccgagattgcttgctcggcctgcgatctggtcaacgtggacctggacgactgtgtttctgagcaataaatgacttaaaccaggtatggctgccgatggttatcttccagattggcttgaggacaacctctctgagggcattcgcgagtggtgggacctgaaacctggagccccgaaacccaaagccaaccagcaaaagcaggacgacggccggggtctggtgcttcctggctacaagtacctcggacccttcaacggactcgacaagggggagcccgtcaacgcggcggacgcagcggccctcgagcacgacaaggcctacgaccagcagctcaaagcgggtgacaatccgtacctgcggtataaccacgccgacgccgagtttcaggagcgtctgcaagaagatacgtcttttgggggcaacctcgggcgagcagtcttccaggccaagaagcgggttctcgaacctctcggtctggttgaggaaggcgctaagacggctcctggaaagaagagaccggtagagccatcacctcagcgttcccccgactcctccacgggcatcggcaagaaaggccaccagcccgcgagaaagagactgaactttgggcagactggcgactcggagtcagtccccgaccctcaaccaatcggagaaccaccagcaggcccctctggtctgggatctggtacaatggctgcaggcggtggcgctccaatggcagacaataacgaaggcgccgacggagtgggtagttcctcaggaaattggcattgcgattccacatggctgggcgacagagtcatcaccaccagcacccgaacctgggccctgcccacctacaacaaccatctctacaagcaaatctccaacgggacatcgggaggaagcactaacgacaacacctactttggctacagcaccccctgggggtattttgacttcaacagattccactgccacttctcaccacgtgactggcagcgactcatcaacaataactggggattccggcccaagagactcaacttcaagctcttcaacatccaggtcaaggaggtcacgcagaatgaaggcaccaagaccatcgccaataaccttaccagcacgattcaggtgtttacggactcggaataccagctcccgtacgtcctcggctctgcgcaccagggctgcctccctccgttcccggcggacgtcttcatgattcctcagtacgggtatctgaccctaaacaatggcagtcaggctgtgggccgttcctccttctactgcctggaatacttcccttctcaaatgctgaggacgggcaacaactttgaattcagctacaccttcgaggacgtgcctttccacagcagctacgcgcacagccagagcctggaccggctgatgaaccctctcatcgaccagtacctgtattacttatccagaactcagtccacaggaggaactcaaggtactcagcaattgttattttctcaagccgggcccgcaaacatgtcggctcaggccaagaactggctacctggaccgtgttaccgtcagcaacgagtttccacgacactgtcgcaaaacaacaacagcaattttgcttggaccggtgccaccaagtatcacctgaatggcagagactccctggttaatcccggcgttgccatggctacccacaaggacgacgaggagcgcttcttcccgtcaagcggagttctaatgtttggcaagcagggggctggaaaagacaatgtggactacagcagcgtgatgctcaccagcgaagaagaaattaaaactactaacccagtggctacagagcagtatggtgtggtggcagacaacctgcagcagaccaacggagctcccattgtgggaactgtcaacagccagggggccttacctggtatggtctggcaaaaccgggacgtgtacctgcagggccccatctgggccaaaattcctcacacggacggcaactttcatccttcgccgctgatgggaggctttggactgaaacacccgcctcctcagatcctggtgaaaaacactcctgttcctgcggatcctccgaccaccttcagccaggccaagctggcttcttttatcacgcagtacagcaccggacaggtcagcgtggaaatcgaatgggagctgcagaaagaaaacagcaagcgctggaacccagagattcagtatacttccaactactacaaatctacaaatgtggactttgctgtcaatactgagggtacttattcagagcctcgccccattggcactcgttatctcacccgtaatctgtaattgcttgttaatcaataaaccggttaattcgtttcagttgaactttggtctctgcgaagggcgaattc

SEQ ID NO: 84 - protein, 738 aa, Artificial Sequence
  source: /note="Description of Artificial Sequence: Synthetic polypeptide"
MAADGYLPDWLEDNLSEGIREWWDLKPGAPKPKANQQKQDDGRGLVLPGYKYLGPFNGLDKGEPVNAADAAALEHDKAYDQQLKAGDNPYLRYNHADAEFQERLQEDTSFGGNLGRAVFQAKKRVLEPLGLVEEGAKTAPGKKRPVEPSPQRSPDSSTGIGKKGHQPARKRLNFGQTGDSESVPDPQPIGEPPAGPSGLGSGTMAAGGGAPMADNNEGADGVGSSSGNWHCDSTWLGDRVITTSTRTWALPTYNNHLYKQISNGTSGGSTNDNTYFGYSTPWGYFDFNRFHCHFSPRDWQRLINNNWGFRPKRLNFKLFNIQVKEVTQNEGTKTIANNLTSTIQVFTDSEYQLPYVLGSAHQGCLPPFPADVFMIPQYGYLTLNNGSQAVGRSSFYCLEYFPSQMLRTGNNFEFSYTFEDVPFHSSYAHSQSLDRLMNPLIDQYLYYLSRTQSTGGTQGTQQLLFSQAGPANMSAQAKNWLPGPCYRQQRVSTTLSQNNNSNFAWTGATKYHLNGRDSLVNPGVAMATHKDDEERFFPSSGVLMFGKQGAGKDNVDYSSVMLTSEEEIKTTNPVATEQYGVVADNLQQTNGAPIVGTVNSQGALPGMVWQNRDVYLQGPIWAKIPHTDGNFHPSPLMGGFGLKHPPPQILVKNTPVPADPPTTFSQAKLASFITQYSTGQVSVEIEWELQKENSKRWNPEIQYTSNYYKSTNVDFAVNTEGTYSEPRPIGTRYLTRNL

SEQ ID NO: 85 - DNA, 3122 bp, Artificial Sequence
  source: /note="Description of Artificial Sequence: Synthetic polynucleotide"
gaattcgccctttctacggctgcgtcaactggaccaatgagaactttcccttcaacgattgcgtcgacaagatggtgatctggtgggaggagggcaagatgacggccaaggtcgtggagtccgccaaggccattctcggcggcagcaaggtgcgtgtggaccaaaagtgcaagtcttccgcccagatcgatcccacccccgtgatcgtcacctccaacaccaacatgtgcgccgtgattgacgggaacagcgccaccttcgagcaccagcagccgttgcaggaccggatgttcaaatttgaactcacccgccgtctggagcatgactttggcaaggtgacgaagcaggaagtcaaagagttcttccgctgggcgcaggatcacgtgaccgaggtggcgcatgagttccacgtcagaaagggtggagccaacaagagacccgcccccgatgacgcggatataagcgagcccaagcgggcctgcccctcagtcgcggatccatcgacgtcagacgcggaaggagctccggtggactttgccgacaggtaccaaaacaaatgttctcgtcacgcgggcatgcttcagatgctgtttccctgcaagacatgcgagagaatgaatcagaatttcaacatttgcttcacgcacgggaccagagactgttcagaatgtttccccggcgtgtcagaatctcaaccggtcgtcagaaagaggacgtatcggaaactctgtgcgattcatcatctgctggggcgggctcccgagattgcttgctcggcctgcgatctggtcaacgtggacctggatgactgtgtttctgagcaataaatgacttaaaccaggtatggctgccgatggttatcttccagattggctcgaggacaacctctctgagggcattcgcgagtggtgggacttgaaacctggagccccgaaacccaaagccaaccagcaaaagcaggacgacggccggggtctggtgcttcctggctacaagtacctcggacccttcaacggactcgacaagggggagcccgtcaacgcggcggacgcagcggccctcgagcacgacaaagcctacgaccagcagctcaaagcgggtgacaatccgtacctgcggtataatcacgccgacgccgagtttcaggagcgtctgcaagaagatacgtcttttgggggcaacctcgggcgagcagtcttccaggccaagaagcgggttctcgaacctctcggtctggttgaggaaggcgctaagacggctcctggaaagaagagactggtagagcagtcgccacaagagccagactcctcctcgggcatcggcaagacaggccagcagcccgctaaaaagagactcaattttggtcagactggcgactcagagtcagtccccgacccacaacctctcggagaacctccagcagccccctcaggtctgggacctaatacaatggcttcaggcggtggcgctccaatggcagacaataacgaaggcgccgacggagtgggtaattcctcgggaaattggcattgcgattccacatggctgggggacagagtcatcaccaccagcacccgaacctgggccctgcccacctacaacaaccacctctacaagcaaatctccaacggcacctcgggaggaagcaccaacgacaacacctattttggctacagcaccccctgggggtattttgacttcaacagattccactgtcacttttcaccacgtgactggcaacgactcatcaacaacaattggggattccggcccaaaagactcaacttcaagctgttcaacatccaggtcaaggaagtcacgacgaacgaaggcaccaagaccatcgccaataatctcaccagcaccgtgcaggtctttacggactcggagtaccagttaccgtacgtgctaggatccgctcaccagggatgtctgcctccgttcccggcggacgtcttcacggttcctcagtacggctatttaactttaaacaatggaagccaagccctgggacgttcctccttctactgtctggagtatttcccatcgcagatgctgagaaccggcaacaactttcagttcagctacaccttcgaggacgtgcctttccacagcagctacgcgcacagccagagcctggacaggctgatgaatcccctcatcgaccagtacctgtactacctggtcagaacgcaaacgactggaactggagggacgcagactctggcattcagccaagcgggtcctagctcaatggccaaccaggctagaaattgggtgcccggaccttgctaccggcagcagcgcgtctccacgacaaccaaccagaacaacaacagcaactttgcctggacgggagctgccaagtttaagctgaacggccgagactctctaatgaatccgggcgtggcaatggcttcccacaaggatgacgacgaccgcttcttcccttcgagcggggtcctgatttttggcaagcaaggagccgggaacgatggagtggattacagccaagtgctgattacagatgaggaagaaatcaaggctaccaaccccgtggccacagaagaatatggagcagtggccatcaacaaccaggccgccaatacgcaggcgcagaccggactcgtgcacaaccagggggtgattcccggcatggtgtggcagaatagagacgtgtacctgcagggtcccatctgggccaaaattcctcacacggacggcaactttcacccgtctcccctgatgggcggctttggactgaagcacccgcctcctcaaattctcatcaagaacacaccggttccagcggacccgccgcttaccttcaaccaggccaagctgaactctttcatcacgcagtacagcaccggacaggtcagcgtggaaatcgagtgggagctgcagaaagaaaacagcaaacgctggaatccagagattcaatacacttccaactactacaaatctacaaatgtggactttgctgtcaacacggaaggagtttatagcgagcctcgccccattggcacccgttacctcacccgcaacctgtaattacatgttaatcaataaaccggttaattcgtttcagttgaactttggtctctgcgaagggcgaattc

SEQ ID NO: 86 - protein, 736 aa, Artificial Sequence
  source: /note="Description of Artificial Sequence: Synthetic polypeptide"
MAADGYLPDWLEDNLSEGIREWWDLKPGAPKPKANQQKQDDGRGLVLPGYKYLGPFNGLDKGEPVNAADAAALEHDKAYDQQLKAGDNPYLRYNHADAEFQERLQEDTSFGGNLGRAVFQAKKRVLEPLGLVEEGAKTAPGKKRLVEQSPQEPDSSSGIGKTGQQPAKKRLNFGQTGDSESVPDPQPLGEPPAAPSGLGPNTMASGGGAPMADNNEGADGVGNSSGNWHCDSTWLGDRVITTSTRTWALPTYNNHLYKQISNGTSGGSTNDNTYFGYSTPWGYFDFNRFHCHFSPRDWQRLINNNWGFRPKRLNFKLFNIQVKEVTTNEGTKTIANNLTSTVQVFTDSEYQLPYVLGSAHQGCLPPFPADVFTVPQYGYLTLNNGSQALGRSSFYCLEYFPSQMLRTGNNFQFSYTFEDVPFHSSYAHSQSLDRLMNPLIDQYLYYLVRTQTTGTGGTQTLAFSQAGPSSMANQARNWVPGPCYRQQRVSTTTNQNNNSNFAWTGAAKFKLNGRDSLMNPGVAMASHKDDDDRFFPSSGVLIFGKQGAGNDGVDYSQVLITDEEEIKATNPVATEEYGAVAINNQAANTQAQTGLVHNQGVIPGMVWQNRDVYLQGPIWAKIPHTDGNFHPSPLMGGFGLKHPPPQILIKNTPVPADPPLTFNQAKLNSFITQYSTGQVSVEIEWELQKENSKRWNPEIQYTSNYYKSTNVDFAVNTEGVYSEPRPIGTRYLTRNL

SEQ ID NO: 87 - DNA, 3117 bp, Artificial Sequence
  source: /note="Description of Artificial Sequence: Synthetic polynucleotide"
gaattcgcccttggctgcgtcaactggaccaatgagaactttcccttcaacgattgcgtcgacaagatggtgatctggtgggaggagggcaagatgacggccaaggtcgtggagtccgccaaggccattctcggcggcagcaaggtgcgtgtggaccaaaagtgcaagtcttccgcccagatcgatcccacccccgtgatcgtcacctccaacaccaacatgtgcgccgtgattgacgggaacagcaccaccttcgagcaccagcagccgttgcaggaccggatgttcaaatttgaactcacccgccgtctggagcatgactttggcaaggtgacgaagcaggaagtcaaagagttcttccgctgggcgcaggatcacgtgaccgaggtggcgcatgagttccacgtcagaaagggtggagccaacaagagacccgcccccgatgacgcggatataagcgagcccaagcgggcctgcccctcagtcgcggatccatcgacgtcagacgcggaaggagctccggtggactttgccgacaggtaccaaaacaaatgttctcgtcacgcgggcatgcttcagatgctgtttccctgcaagacatgcgagagaatgaatcagaatttcaacatttgcttcacgcacgggaccagagactgttcagaatgtttccccggcgtgtcagaatctcaaccggtcgtcagaaagaggacgtatcggaaactctgtgcgattcatcatctgctggggcgggctcccgagattgcttgctcggcctgcgatctggtcaacgtggacctggatgactgtgtttctgagcaataaatgacttaaaccaggtatggctgccgatggttatcttccagattggctcgaggacaacctctctgagggcattcgcgagtggtgggacttgaaacctggagccccgaaacccaaagccaaccagcaaaagcaggacgacggccggggtctggtgcttcctggctacaagtacctcggacccttcaacggactcgacaagggggagcccgtcaacgcggcggacgcagcggccctcgagcacgacaaagcctacgaccagcagctcaaagcgggtgacaatccgtacctgcggtataatcacgccgacgccgagtttcaggagcgtctgcaagaagatacgtcttttgggggcaacctcgggcgagcagtcttccaggccaagaagcgggttctcgaacctctcggtctggttgaggaaggcgctaagacggctcctggaaagaagagaccggtagagcagtcgccacaagagccagactcctcctcgggcatcggcaagacaggccagcagcccgctaaaaagagactcaattttggtcagactggcgactcagagtcagtccccgacccacaacctctcggagaacctccagcagccccctcaggtctgggacctaatacaatggcttcaggcggtggcgctccaatggcagacaataacgaaggcgccgacggagtgggtaattcctcgggaaattggcattgcgattccacatggctgggggacagagtcatcaccaccagcacccgaacctgggccctgcccacctacaacaaccacctctacaagcaaatctccaacggcacctcgggaggaagcaccaacgacaacacctattttggctacagcaccccctgggggtattttgacttcaacagattccactgtcacttttcaccacgtgactggcaacgactcatcaacaacaattggggattccggcccaaaagactcaacttcaagctgttcaacatccaggtcaaggaagtcacgacgaacgaaggcaccaagaccatcgccaataatctcaccagcaccgtgcgggtctttacggactcggagtaccagttaccgtacgtgctaggatccgctcaccagggatgtctgcctccgttcccggcggacgtcttcatggttcctcagtacggctatttaactttaaacaatggaagccaagccctgggacgttcctccttctactgtctggagtatttcccatcgcagatgctgagaaccggcaacaactttcagttcagctacaccttcgaggacgtgcctttccacagcagctacgcgcacagccagagcctggacaggctgatgaatcccctcatcgaccagtacctgtactacctggtcagaacgcaaacgactggaactggagggacgcagactctggcattcagccaagcgggtcctagctcaatggccaaccaggctagaaattgggtgcccggaccttgctaccggcagcagcgcgtctccacgacaaccaaccagagcaacaacagcaactttgcctggacgggagctgccaagtttaagctgaacggccgagactctctaatgaatccgggcgtggcaatggcttcccacaaggatgacgacgaccgcttcttcccttcgagcggggtcctgatttttggcaagcaaggagccgggaacgatggagtggattacagccaagtgctgattacagatgaggaagaaatcaaggctaccaaccccgtggccacagaagaatatggagcagtggccatcaacaaccaggccgccaatacgcaggcgcagaccggactcgtgcacaaccagggggtgattcccggcatggtgtggcagaatagagacgtgtacctgcagggtcccatctgggccaaaattcctcacacggacggcaactttcacccgtctcccctgatgggcggctttggactgaagcacccgcctcctcaaattctcatcaagaacacaccggttccagcggacccgccgcttaccttcaaccaggccaagctgaactctttcatcacgcagtacagcaccggacaggtcagcgtggaaatcgagtgggagctgcagaaagaaaacagcaaacgctggaatccagagattcaatacacttccaactactacaaatctacaaatgtggactttgctgtcaacacggaaggagtttatagcgagcctcgccccattggcacccgttacctcacccgcaacctgtaattacatgttaatcaataaaccggttaattcgtttcagttgaactttggtctctgcgaagggcgaattc

SEQ ID NO: 88 - protein, 736 aa, Artificial Sequence
  source: /note="Description of Artificial Sequence: Synthetic polypeptide"
MAADGYLPDWLEDNLSEGIREWWDLKPGAPKPKANQQKQDDGRGLVLPGYKYLGPFNGLDKGEPVNAADAAALEHDKAYDQQLKAGDNPYLRYNHADAEFQERLQEDTSFGGNLGRAVFQAKKRVLEPLGLVEEGAKTAPGKKRPVEQSPQEPDSSSGIGKTGQQPAKKRLNFGQTGDSESVPDPQPLGEPPAAPSGLGPNTMASGGGAPMADNNEGADGVGNSSGNWHCDSTWLGDRVITTSTRTWALPTYNNHLYKQISNGTSGGSTNDNTYFGYSTPWGYFDFNRFHCHFSPRDWQRLINNNWGFRPKRLNFKLFNIQVKEVTTNEGTKTIANNLTSTVRVFTDSEYQLPYVLGSAHQGCLPPFPADVFMVPQYGYLTLNNGSQALGRSSFYCLEYFPSQMLRTGNNFQFSYTFEDVPFHSSYAHSQSLDRLMNPLIDQYLYYLVRTQTTGTGGTQTLAFSQAGPSSMANQARNWVPGPCYRQQRVSTTTNQSNNSNFAWTGAAKFKLNGRDSLMNPGVAMASHKDDDDRFFPSSGVLIFGKQGAGNDGVDYSQVLITDEEEIKATNPVATEEYGAVAINNQAANTQAQTGLVHNQGVIPGMVWQNRDVYLQGPIWAKIPHTDGNFHPSPLMGGFGLKHPPPQILIKNTPVPADPPLTFNQAKLNSFITQYSTGQVSVEIEWELQKENSKRWNPEIQYTSNYYKSTNVDFAVNTEGVYSEPRPIGTRYLTRNL

SEQ ID NO: 89 - DNA, 3121 bp, Artificial Sequence
  source: /note="Description of Artificial Sequence: Synthetic polynucleotide"
gaattcgcccttctacggctgcgtcaactggaccaatgagaactttcccttcaacgattgcgtcgacaagatggtgatctggtgggaggagggcaagatgacggccaaggtcgtggagtccgccaaggccattctcggcggcagcaaggtgcgtgtggaccaaaagtgcaagtcttccgcccagatcgatcccacccccgtgatcgtcacctccaacaccaacatgtgcgccgtgattgacgggaacagcaccaccttcgagcaccagcagccgttgcaggaccggatgttcaaatttgaactcacccgccgtctggagcatgactttggcaaggtgacgaagcaggaagtcaaagagttcttccgctgggcgcaggatcacgtgaccgaggtggcgcatgagttccacgtcagaaagggtggcgccaacaagagacccgcccccgatgacgcggatataagcgagcccaagcgggcctgcccctcagtcgcggatccatcgacgtcagacgcggaaggagctccggtggactttgccgacaggtaccaaaacaaatgttctcgtcacgcgggcatgcttcagatgctgtttccctgcaagacatgcgagagaatgaatcagaatttcaacatttgcttcacgcacgggaccagagactgttcagaatgtttccccggcgtgtcagaatctcaaccggtcgtcagaaagaggacgtatcggaaactctgtgcgattcatcatctgctggggcgggctcccgagattgcttgctcggcctgcgatctggtcaacgtggacctggatgactgtgtttctgagcaataaatgacttaaaccaggtatggctgccgatggttatcttccagattggctcgaggacaacctctctgagggcattcgcgagtggtgggacttgaaacctggagccccgaaacccaaagccaaccagcaaaagcaggacgacggccggggtctggtgcttcctggctacaagtacctcggacccttcaacggactcgacaagggggagcccgtcaacgcggcggacgcagcggccctcgagcacgacaaagcctacgaccagcagctcaaagcgggtgacaatccgtacctgcggtataatcacgccgacgccgagtttcaggagcgtctgcaagaagatacgtcctttgggggcaacctcgggcgagcagtcttccaggccaagaagcgggttctcgaacctctcggtctggttgaggaaggcgctaagacggctcctggaaagaagagaccggtagagcagtcgccacaagagccagactcctcctcgggcatcggcaagacaggccagcagcccgctaaaaagagactcaattttggtcagactggcgactcagagtcagtccccgacccacaacctctcggagaacctccagcagccccctcaggtctgggacctaatacaatggcttcaggcggtggcgctccaatggcagacaataacgaaggcgccgacggagtgggtaattcctcgggaaattggcattgcgattccacatggctgggggacagagtcatcaccaccagcacccgaacctgggccctgcccacctacaacaaccacctctacaagcaaatctccaacggcacctcgggaggaagcaccaacgacaacacctattttggctacagcaccccctgggggtattttgacttcaacagattccactgtcacttttcaccacgtgactggcaacgactcatcaacaacaattggggattccggcccaaaagactcaacttcaagctgttcaacatccaggtcaaggaagtcacgacgaacgaaggcaccaagaccatcgccaataatctcaccagcaccgtgcaggtctttacggacttggagtaccagttaccgtacgtgctaggatccgctcaccagggatgtctgcctccgttcccggcggacgtcttcatggttcctcagtacggctatttaactttaaacaatggaagccaagccctgggacgttcctccttctactgtctggagtatttcccatcgcagatgccgagaaccggcaacaactttcagttcagctacaccttcgaggacgtgcctttccacagcagctacgcgcacagccagagcctggacaggctgatgaatcccctcatcgaccagtacctgtactacctggtcagaacgcaaacgactggaactggagggacgcagactctggcattcagccaagcgggtcctagctcaatggccaaccaggctagaaattgggtgcccggaccttgctaccggcagcagcgcgtctccacgacaaccaaccagaacaacaacagcaactttgcctggacgggagctgccaagtttaagctgaacggccgagactctctaatgaatccgggcgtggcaatggcttcccacaaggatgacgacgaccgcttcttcccttcgagcggggtcctgatttttggcaagcaaggagccgggaacgatggagtggattacagccaagtgctgattacagatgaggaagaaatcaaggctaccaaccccgtggccacagaagaatatggagcagtggccatcaacaaccaggccgccaatacgcaggcgcagaccggactcgtgcacaaccagggggtgattcccggcatggtgtggcagaatagagacgtgtacctgcagggtcccatctgggccaaaattcctcacacggacggcaactttcacccgtctcccctgatgggcggctttggactgaagcacccgcctcctcaaattctcatcaagaacacaccggttccagcggacccgccgcttaccttcaaccaggccaagctgaactctttcatcacgcagtacagcaccggacaggtcagcgtggaaatcgagtgggagctgcagaaagaaaacagcaaacgctggaatccagagattcaatacacttccaactactacaaatctacaaatgtggactttgctgtcaacacggaaggagtttatagcgagcctcgccccattggcacccgttacctcacccgcaacctgtaattacatgttaatcaataaaccggttaattcgtttcagttgaactttggtctctgcgaagggcgaattc

SEQ ID NO: 90 - protein, 736 aa, Artificial Sequence
  source: /note="Description of Artificial Sequence: Synthetic polypeptide"
MAADGYLPDWLEDNLSEGIREWWDLKPGAPKPKANQQKQDDGRGLVLPGYKYLGPFNGLDKGEPVNAADAAALEHDKAYDQQLKAGDNPYLRYNHADAEFQERLQEDTSFGGNLGRAVFQAKKRVLEPLGLVEEGAKTAPGKKRPVEQSPQEPDSSSGIGKTGQQPAKKRLNFGQTGDSESVPDPQPLGEPPAAPSGLGPNTMASGGGAPMADNNEGADGVGNSSGNWHCDSTWLGDRVITTSTRTWALPTYNNHLYKQISNGTSGGSTNDNTYFGYSTPWGYFDFNRFHCHFSPRDWQRLINNNWGFRPKRLNFKLFNIQVKEVTTNEGTKTIANNLTSTVQVFTDLEYQLPYVLGSAHQGCLPPFPADVFMVPQYGYLTLNNGSQALGRSSFYCLEYFPSQMPRTGNNFQFSYTFEDVPFHSSYAHSQSLDRLMNPLIDQYLYYLVRTQTTGTGGTQTLAFSQAGPSSMANQARNWVPGPCYRQQRVSTTTNQNNNSNFAWTGAAKFKLNGRDSLMNPGVAMASHKDDDDRFFPSSGVLIFGKQGAGNDGVDYSQVLITDEEEIKATNPVATEEYGAVAINNQAANTQAQTGLVHNQGVIPGMVWQNRDVYLQGPIWAKIPHTDGNFHPSPLMGGFGLKHPPPQILIKNTPVPADPPLTFNQAKLNSFITQYSTGQVSVEIEWELQKENSKRWNPEIQYTSNYYKSTNVDFAVNTEGVYSEPRPIGTRYLTRNL

SEQ ID NO: 91 - DNA, 3122 bp, Artificial Sequence
  source: /note="Description of Artificial Sequence: Synthetic polynucleotide"
gaattcgccctttctacggctgcgtcaactggaccaatgagaactttcccttcaacgattgcgtcgacaagatggtgatctggtgggaggagggcaagatgacggccaaggtcgtggagtccgccaaggccattctcggcggcagcaaggtgcgtgtggaccaaaagtgcaagtcttccgcccagatcgatcccacccccgtgatcgtcacctccaacaccaacatgtgcgccgtgattgacgggaacagcaccaccttcgagcaccagcagccgttgcaggaccggatgttcaaatttgaactcacccgccgtctggagcatgactttggcaaggtgacgaagcaggaagtcaaagggttcttccgctgggcgcaggatcacgtgaccgaggtggcgcatgagttccacgtgcgagcccaagcgggcctgcccctcagtcgcggatccatcgacgtcagaccagaaagggtggagccaacaagagacccgcccccgatgacgcggatataagcggaaggagctccggtggactttgccgacaggtaccaaaacaaatgttctcgtcacgcgggcatgcttcagatgctgtttccctgcaagacatgcgagagaatgaatcagaatttcaacatttgcttcacgcacgggaccagagactgttcagaatgtttccccggcgtgtcagaatctcaaccggtcgtcagaaagaggacgtatcggaaactctgtgcgattcatcatctgctggggcgggctcccgagattgcttgctcggcctgcgatctggtcaacgtggacctggatgactgtgtttctgagcaataaatgacttaaaccaggtatggctgccgatggttatcttccagattggctcgaggacaacctctctgagggcattcgcgagtggtgggacttgaaacctggagccccgaaacccaaagccaaccagcaaaagcaggacgacggccggggtctggtgcttcctggctacaagtacctcggacccttcaacggactcgacaagggggagcccgtcaacgcggcggacgcagcggccctcgagcacgacaaagcctacgaccagcagctcaaagcgggtgacaatccgtacctgcggtataatcacgccgacgccgagtttcaggagcgtctgcaagaagatacgtcttttgggggcaacctcgggcgagcagtcttccaggccaagaagcgggttctcgaacctctcggtctggttgaggaaggcgctaagacggctcctggaaagaagagaccggtagagcagtcgccacaagagccagactcctcctcgggcatcggcaagacaggccagcagcccgctaaaaagagactcaattttggtcagactggcgactcagagtcagtccccgacccacaacctctcggagaacctccagcagccccctcaggtctgggacctaatacaatggcttcaggcggtggcgctccaatggcagacaataacgaaggcgccgacggagtgggtaattcctcgggaaattggcattgcgattccacatggctgggggacagagtcatcaccaccagcacccgaacctgggccctgcccacctacaacaaccacctctacaagcaaatctccaacggcacctcgggaggaagcaccaacgacaacacctattttggctacagcaccccctgggggtattttgacttcaacagattccactgtcacttttcaccacgtgactggcaacgactcatcaacaacaattggggattccggcccaaaagactcaacttcaagctgttcaacatccaggtcaaggaagtcacgacgaacgaaggcaccaagaccatcgccaataatctcaccagcaccgtgcaggtctttacggactcggagtaccagttaccgtacgtgctaggatccgctcaccagggatgtctgcctccgttcccggcggacgtcttcatggttcctcagtacggctatttaactttaaacaatggaagccaagccctgggacgttcctccttctactgtctggagtatttcccatcgcagatgctgagaaccggcaacaactttcagttcagctacaccttcgaggacgtgcctttccacagcagctacgcgcacagccagagcctggacaggctgatgaatcccctcatcgaccagtacctgtactacctggtcagaacgcaaacgactggaactggagggacgcagactctggcattcagccaagcgggtcctagctcaatggccaaccaggctagaaattgggtgcccggaccttgctaccggcagcagcgcgtctccacgacaaccaaccagaacaacaacagcaactttgcctggacgggagctgccaagtttaagctgaacggccgagactctctaatgaatccgggcgtggcaatggcttcccacaaggatgacgacgaccgcttcttcccttcgagcggggtcctgatttttggcaagcaaggagccgggaacgatggagtggattacagccaagtgctgattacagatgaggaagaaatcaaggctaccaaccccgtggccacagaagaatatggagcagtggccatcaacaaccaggccgccaatacgcaggcgcagaccggactcgtgcacaaccagggggtgattcccggcatggtgtggcagaatagagacgtgtacctgcagggtcccatctgggccaaaattcctcacacggacggcaactttcacccgtctcccctgatgggcggctttggactgaagcacccgcctcctcaaattctcatcaagaacacaccggttccagcggacccgccgcttaccttcaaccaggccaagctgaactctttcatcacgcagtacagcaccggacaggtcagcgtggaaatcgagtgggagctgcagaaagaaaacagcaaacgctggaatccagagattcaatacacttccaactactacaaatctacaaatgtggactttgctgtcaacacggagggggtttatagcgagcctcgccccattggcacccgttacctcacccgcaacctgtaattacatgttaatcaataaaccggttaattcgtttcagttgaactttggtctctgcgaagggcgaattc

SEQ ID NO: 92 - protein, 736 aa, Artificial Sequence
  source: /note="Description of Artificial Sequence: Synthetic polypeptide"
MAADGYLPDWLEDNLSEGIREWWDLKPGAPKPKANQQKQDDGRGLVLPGYKYLGPFNGLDKGEPVNAADAAALEHDKAYDQQLKAGDNPYLRYNHADAEFQERLQEDTSFGGNLGRAVFQAKKRVLEPLGLVEEGAKTAPGKKRPVEQSPQEPDSSSGIGKTGQQPAKKRLNFGQTGDSESVPDPQPLGEPPAAPSGLGPNTMASGGGAPMADNNEGADGVGNSSGNWHCDSTWLGDRVITTSTRTWALPTYNNHLYKQISNGTSGGSTNDNTYFGYSTPWGYFDFNRFHCHFSPRDWQRLINNNWGFRPKRLNFKLFNIQVKEVTTNEGTKTIANNLTSTVQVFTDSEYQLPYVLGSAHQGCLPPFPADVFMVPQYGYLTLNNGSQALGRSSFYCLEYFPSQMLRTGNNFQFSYTFEDVPFHSSYAHSQSLDRLMNPLIDQYLYYLVRTQTTGTGGTQTLAFSQAGPSSMANQARNWVPGPCYRQQRVSTTTNQNNNSNFAWTGAAKFKLNGRDSLMNPGVAMASHKDDDDRFFPSSGVLIFGKQGAGNDGVDYSQVLITDEEEIKATNPVATEEYGAVAINNQAANTQAQTGLVHNQGVIPGMVWQNRDVYLQGPIWAKIPHTDGNFHPSPLMGGFGLKHPPPQILIKNTPVPADPPLTFNQAKLNSFITQYSTGQVSVEIEWELQKENSKRWNPEIQYTSNYYKSTNVDFAVNTEGVYSEPRPIGTRYLTRNL

SEQ ID NO: 93 - DNA, 2370 bp, Artificial Sequence
  source: /note="Description of Artificial Sequence: Synthetic polynucleotide"
gaattcgccctttctacggctgcgtcaactggaccaatgagaactttcccttcaacgattgcgtcgacaagatggtgatctggtgggaggagggcaagatgacggccaaggtcgtggagtccgccaaggccattctcggcggcagcaaggtgcgcgtggaccaaaagtgcaagtcgtccgcccagatcgaccccacccccgtgatcgtcacctccaacaccaacatgtgcgccgtgattgacgggaacagcaccaccttcgagcaccagcagccgttgcaggaccggatgttcaagttcgaactcacccgccgtctggagcacgactttggcaaggtgaccaagcaggaagtcaaagagttcttccgctgggcgcaggatcacgtgaccgaggtggcgcatgagttctacgtcagaaagggcggagccagcaaaagacccgcccccgatgacgcggatataagcgagcccaagcgggcctgcccctcagtcgcggatccatcgacgtcagacgcggaaggagctccggtggactttgccgacaggtaccaaaacaaatgttctcgtcacgcgggcatgcttcagacgctgtttccctgcaaaacgtgcgagagaatgaatcagaatttcaacatttgcttcacgcacggggtcagagactgctcagaatgtttccccggtgcatcagaatctcaaccggtcgtcagaaaaaaaacgtatcagaaactgtgtgccattcatcatctgctggggcgggcacccgagattgcttgctcggcctgcgatctggtcaacgtggacctggacgactgtgtttctgagcaataaatgacttaaaccaggtatggctgccgatggttatcttccagattggcttgaggacaacctctctgagggcattcgcgagtggtgggacctgaaacctggagccccgaaacccaaagccaaccagcaaaagcaggacgacggccggggtctggtgcttcctggctacaagtacctcggacccttcaacggactcgacaagggggagcccgtcaacgcggcggacgcagcggccctcgagcacgacaaggcctacgaccagcagctcaaagcgggtgacaatccgtacctgcggtataaccacgccgacgccgagtttcaggagcgtctgcaagaagatacgtcttttgggggcaacctcgggcgagcagtcttccaggccaagaagcgggttctcgaacctctcggtctggttgaggaaggcgctaagacggctcctggaaagaagagaccggtagagccatcacctcagcgttcccccgactcctccacgggcatcggcaagaaaggccaccagcccgcgagaaagagactgaactttgggcagactggcgactcggagtcagtccccgaccctcaaccaatcggagaaccaccagcaggcccctctggtctgggatctggtacaatggctgcaggcggtggcgctccaatggcagacaataacgaaggcgccgacggagtgggtagttcctcaggaaattggcattgcgattccacatggctgggcgacagagtcatcaccaccagcacccgaacctgggccctgcccacctacaacaaccatctctacaagcaaatctccaacgggacatcgggaggaagcactaacgacaacacctactttggctacagcaccccctgggggtattttgacttcaacagattccactgccacttctcaccacgtgactggcagcgactcatcaacaataactggggattccggcccaagagactcaacttcaagctcttcaacatccaggtcaaggaggtcacgcagaatgaaggcaccaagaccatcgccaataaccttaccagcacgattcaggtgtttacggactcggaataccagctcccgtacgtcctcggctctgcgcaccagggctgcctccctccgttcccggcggacgtcttcatgattcctcagtacgggtatctgaccctaaacaatggcagtcaggctgtgggccgttcctccttctactgcctggaatacttcccttctcaaatgctgaggacgggcaacaactttgaattcagctacaccttcgaggacgtgcctttccacagcagctacgcgcacagccagagcctggaccggctgatgaaccctctcatcgaccagtacctgtattacttatccagaactcagtccacaggaggaactcaaggtactcagcaattgttattttctcaagccgggcccgcaaacatgtyggctcaggccaagaactggctacctggaccgtgttaccgtcagcaacgagtttccacgacactgtcgcaaaacaacaacagcaattttgctggaccggtgccacca

SEQ ID NO: 94 - protein, 738 aa, Artificial Sequence; identical to SEQ ID NO: 84
  source: /note="Description of Artificial Sequence: Synthetic polypeptide"

SEQ ID NO: 95 - DNA, 2205 bp, Artificial Sequence
  source: /note="Description of Artificial Sequence: Synthetic polynucleotide"
atgactgacggttaccttccagattggctagaggacaacctctctgaaggcgttcgagagtggtgggcgctgcaacctggagcccctaaacccaaggcaaatcaacaacatcaggacaacgctcggggtcttgtgcttccgggttacaaatacctcggacccggcaacggactcgacaagggggaacccgtcaacgcagcggacgcggcagccctcgagcacgacaaggcctacgaccagcagctcaaggccggtgacaacccctacctcaagtacaaccacgccgacgcggagttccagcagcggcttcagggcgacacatcgtttgggggcaacctcggcagagcagtcttccaggccaaaaagagggttcttgaacctcttggtctggttgagcaagcgggtgagacggctcctggaaagaagagaccgttgattgaatccccccagcagcccgactcctccacgggtatcggcaaaaaaggcaagcagccggctaaaaagaagctcgttttcgaagacgaaactggagcaggcgacggaccccctgagggatcaacttccggagccatgtctgatgacagtgagatgcgtgcagcagctggcggagctgcagtcgagggcggacaaggtgccgatggagtgggtaatgcctcgggtgattggcattgcgattccacctggtctgagggccacgtcacgaccaccagcaccagaacctgggtcttgcccacctacaacaaccacctctacaagcgactcggagagagcctgcagtccaacacctacaacggattctccaccccctggggatactttgacttcaaccgcttccactgccacttctcaccacgtgactggcagcgactcatcaacaacaactggggcatgcgacccaaagccatgcgggtcaaaatcttcaacatccaggtcaaggaggtcacgacgtcgaacggcgagacaacggtggctaataaccttaccagcacggttcagatctttgcggactcgtcgtacgaactgccgtacgtgatggatgcgggtcaagagggcagcctgcctccttttcccaacgacgtctttatggtgccccagtacggctactgtggactggtgaccggcaacacttcgcagcaacagactgacagaaatgccttctactgcctggagtactttccttcgcagatgctgcggactggcaacaactttgaaattacgtacagttttgagaaggtgcctttccactcgatgtacgcgcacagccagagcctggaccggctgatgaaccctctcatcgaccagtacctgtggggactgcaatcgaccaccaccggaaccaccctgaatgccgggactgccaccaccaactttaccaagctgcggcctaccaacttttccaactttaaaaagaactggctgcccgggccttcaatcaagcagcagggcttctcaaagactgccaatcaaaactacaagatccctgccaccgggtcagacagtctcatcaaatacgagacgcacagcactctggacggaagatggagtgccctgacccccggacctccaatggccacggctggacctgcggacagcaagttcagcaacagccagctcatctttgcggggcctaaacagaacggcaacacggccaccgtacccgggactctgatcttcacctctgaggaggagctggcagccaccaacgccaccgatacggacatgtggggcaacctacctggcggtgaccagagcaacagcaacctgccgaccgtggacagactgacagccttgggagccgtgcctggaatggtctggcaaaacagagacatttactaccagggtcccatttgggccaagattcctcataccgatggacactttcacccctcaccgctgattggtgggtttgggctgaaacacccgcctcctcaaatttttatcaagaacaccccggtacctgcgaatcctgcaacgaccttcagctctactccggtaaactccttcattactcagtacagcactggccaggtgtcggtgcagattgactgggagatccagaaggagcggtccaaacgctggaaccccgaggtccagtttacctccaactacggacagcaaaactctctgttgtgggctcccgatgcggctgggaaatacactgagcctagggctatcggtacccgctacctcacccaccacctgtaa

SEQ ID NO: 96 - protein, 734 aa, Artificial Sequence; identical to SEQ ID NO: 68
  source: /note="Description of Artificial Sequence: Synthetic polypeptide"

SEQ ID NO: 97 - DNA, 3128 bp, Artificial Sequence
  source: /note="Description of Artificial Sequence: Synthetic polynucleotide"
gaattcgccctttctacggctgcgtcaactggaccaatgagaactttcccttcaacgattgcgtcgacaagatgttgatctggtgggaggagggcaagatgacggccaaggtcgtggagtccgccaaggccattctcggcggcagcaaagtgcgcgtggaccaaaagtgcaagccgtccgcccagatcgaccccacccccgtgatcgtcacctccaacaccaacatgtgcgccgtgattgacgggaacagcaccaccttcgagcaccagcagccgttgcgggaccggatgttcaagtttgaactcacccgccgtctggagcacgactttggcaaggtgacaaagcaggaagtcagagagttcttccgctgggcgcaggatcacgtgaccgaggtggcgcacgagttctacgtcagaaagggtggagccaacaagagacccgcccccgatgacgcggataaaagcgagcccaagcgggcctgcccctcagtcgcggatccatcgacgtcagacgcggaaggagctccggtggactttgccgacaggtaccaaaacaaatgttctcgtcacgcgggcatgcttcagatgctgtttccctgcaaaacatgcgagagaatgaatcagaatttcaacatttgcttcacgcacgggaccagagactgttcagaatgtttccccggcgtgtcagaatctcaaccggtcgtcagaaaaaagacgtatcggaaactctgtgcgattcatcatctgctggggcgggcacccgagattgcttgctcggcctgcgatctggtcaacgtggacctagatgactgtgtttctgagcaataaatgacttaaaccaggtatggctgccgatggttatcttccagattggctcgaggacaacctctctgagggcattcgcgagtggtgggacttgaaacctggagccccgaaacccaaagccaaccagcaaaagcaggacgacggccggggtctggtgcttcctggctacaagtacctcggacccttcaacggactcgacaagggggagcccgtcaacgcggcggacgcagcggccctcgagcacgacaaggcctacgaccagcagctcaaagcgggtgacaatccgtacctgcggtataaccacgccgacgccgagtttcaggagcgtctgcaagaagatacgtcttttgggggcaacctcgggcgagcagtcttccaggccaagaagcgggttctcgaacctctcggtctggttgaggaaggcgctaagacggctcctggaaagaagagaccggtagagccatcaccccagcgttctccagactcctctacgggcatcggcaagaaaggccagcagcccgcgaaaaagagactcaactttgggcagactggcgactcagagtcagtgcccgaccctcaaccaatcggagaaccccccgcaggcccctctggtctgggatctggtacaatggctgcaggcggtggcgctccaatggcagacaataacgaaggcgccgacggagtgggtagttcctcaggaaattggcattgcgattccacatggctgggcgacagagtcatcaccaccagcacccgaacctgggccctccccacctacaacaaccacctctacaagcaaatctccaacgggacttcgggaggaagcaccaacgacaacacctacttcggctacagcaccccctgggggtattttgactttaacagattccactgccacttctcaccacgtgactggcagcgactcatcaacaacaactggggattccggcccaagagactcaacttcaagctcttcaacatccaggtcaaggaggtcacgcagaatgaaggcaccaagaccatcgccaataaccttaccagcacgattcaggtctttacggactcggaataccagctcccgtacgtcctcggctctgcgcaccagggctgcctgcctccgttcccggcggacgtcttcatgattcctcagtacgggtacctgactctgaacaatggcagtcaggccgtgggccgttcctccttctactgcctggagtactttccttctcaaatgctgagaacgggcaacaactttgagttcagctaccagtttgaggacgtgccttttcacagcagctacgcgcacagccaaagcctggaccggctgatgaaccccctcatcgaccagtacctgtactacctgtctcggactcagtccacgggaggtaccgcaggaactcagcagttgctattttctcaggccgggcctaataacatgtcggctcaggccaaaaactggctacccgggccctgctaccggcagcaacgcgtctccacgacactgtcgcaaaataacaacagcaactgtaaatcccggtgtcgctatggcaacccacaaggacgacgaagagcgattttgcctggaccggtgccaccaagtatcatctgaatggcagagactctctgttttccgtccagcggagtcttaatgtttgggaaacagggagctggaaaagacaacgtggactatagcagcgttatgctaaccagtgaggaagaaattaaaaccaccaacccagtggccacggaacagtacggcgtggtggccgataacctgcaacagcaaaacgccgctcctattgtaggggccgtcaacagtcaaggagccttacctggcatggtctggcagaaccgggacgtgtacctgcagggtcctatctgggccaagattcctcacacggacggaaactttcatccctcgccgctgatgggaggctttggactgaaacacccgcctcctcagatcctgattaagaatacacctgttcccgcggatcctccaactaccttcagtcaagctaagctggcgtcgttcatcacgcagtacagcaccggacaggtcagcgtggaaattgaatgggagctgcagaaagaaaacagcaaacgctggaacccagagattcaatacacttccaactactacaaatctacaaatgtggacttcgctgttaacacagatggcacttattctgagcctcgccccattggcacccgttacctcacccgtaatctgtaattgctcgttaatcaataaaccggttgattcgtttcagttgaactttggtctctgcgaagggcgaattc

SEQ ID NO: 98 - protein, 738 aa, Artificial Sequence; identical to SEQ ID NO: 18
  source: /note="Description of Artificial Sequence: Synthetic polypeptide"

SEQ ID NO: 99 - DNA, 3128 bp, Artificial Sequence
  source: /note="Description of Artificial Sequence: Synthetic polynucleotide"
gaattcgccctttctacggctgcgtcaactggaccaatgagaactttcccttcaacgattgcgtcgacaagatggtgatctggtgggaggagggcaagatgacggccaaggtcgtggagtccgccaaggccattctcggcggcagcaaagtgcgcgtggaccaaaagtgcaagtcgtccgcccagatcgaccccacccccgtgatcgtcacctccaacaccaacatgtgcgccgtgattgacgggaacagcaccaccttcgagcaccagcagccgttgcaggaccggatgttcaagtttgaactcacccgccgtctggagcacgactttggcaaggtgacaaagcaggaagtcagagagttcttccgctgggcgcaggatcacgtgaccgaggtggcgcacgagttctacgtcagaaagggtggagccaacaagagacccgcccccgatgacgcggataaaagcgagcccaagcgggcctgcccctcagtcgcggatccatcgacgtcagacgcggaaggagctccggtggactttgccgacaggtaccaaaacaaatgttctcgtcacgcgggcatgcttcagatgctgtttccctgcaaaacatgcgagagaatgaatcagaatttcaacatttgcttcacgcacgggaccagagactgttcagaatgtttccccggcgtgtcagaatctcaaccggttgtcagaaaaaagacgtatcggaaactctgtgcgattcatcatctgctggggcgggcacccgagattgcttgctcggcctgcgatctggtcaacgtggacctagatgactgtgtttctgagcaataaatgacttaaaccaggtatggctgccgatggttatcttccagattggctcgaggacaacctctctgagggcattcgcgagtggtgggacttgaaacctggagccccgaaacccaaagccaaccagcaaaagcaggacgacggccggggtctggtgcttcctggctacaagtacctcggacccttcaacggactcgacaagggggagcccgtcaacgcggcggacgcagcggccctcgagcacgacaaggcctacgaccagcagctcaaagcgggtgacaatccgtacctgcggtataaccacgccgacgccgagtttcaggagcgtctgcaagaagatacgtcttttgggggcaacctcgggcgagcagtcttccaggccaagaagcgggttctcgaacctctcggtctggttgaggaaggcgctaagacggctcctggaaagaagagaccggtagagccatcaccccagcgttctccagactcctctacgggcatcggcaagaaaggccagcagcccgcgaaaaagagactcaactttgggcagactggcgactcagagtcagtgcccgaccctcaaccaatcggagaaccccccgcaggcccctctggtctgggatctggtacaatggctgcaggcggtggcgctccaatggcagacaataacgaaggcgccgacggagtgggtagttcctcaggaaattggcattgcgattccacatggctgggcgacagagtcatcaccaccagcacccgaacctgggccctccccacctacaacaaccacctctacaagcaaatctccaacgggacttcgggaggaagcaccaacgacaacacctacttcggctacagcaccccctgggggtattttgactttaacagattccactgccacttctcaccacgtgactggcagcgactcatcaacaacaactggggattccggcccaagagacccaacttcaagctcttcaacatccaggtcaaggaggtcacgcagaatgaaggcaccaagaccatcgccaataaccttaccagcacgattcaggtctttacggactcggaataccagctcccgtacgtcctcggctctgcgcaccagggctgcctgcctccgttcccggcggacgtcttcatgattcctcagtacgggtacctgactctgaacaatggcagtcaggccgtgggccgttcctccttctactgcctggagtactttccttctcaaatgctgagaacgggcaacaactttgagttcagctaccagtttgaggacgtgccttttcacagcagctacgcgcacagccaaagcctggaccggctgatgaaccccctcatcgaccagtacctgtactacctgtctcggactcagtccacgggaggtaccgcaggaactcagcagttgctattttctcaggccgggcctaataacatgtcggctcaggccaaaaactggctacccgggccctgctaccggcagcaacgcgtctccacgacactgtcgcaaaataacaacagcaactttgcctggaccggtgccaccaagtatcatctgaatggcagagactctctggtaaatcccggtgtcgctatggcaacccacaaggacgacgaagagcgattttttccgtccagcggagtcttaatgtttgggaaacagggagctggaaaagacaacgtggactatagcagcgttatgctaaccagtgaggaagaaattaaaaccaccaacccagtggccacagaacagtacggcgtggtggccgataacctgcaacagcaaaacgccgctcctattgtaggggccgtcaacagtcaaggagccttacctggcatggtctggcagaaccgggacgtgtacctgcagggtcctatctgggccaagattcctcacacggacggaaactttcatccctcgccgctgatgggaggctttggactgaaacacccgcctcctcagatcctgattaagaatacacctgttcccgcggatcctccaactaccttcagtcaagctaagctggcgtcgttcatcacgcagtacagcaccggacaggtcagcgtggaaattgaatgggagctgcagaaagaaaacagcaaacgctggaacccagagattcaatacacttccaactactacaaatctacaaatgtggactttgctgttaacacagatggcacttattctgagcctcgccccattggcacccgttacctcacccgtaatctgtaattgcttgttaatcaataaaccggttgattcgtttcagttgaactttggtctctgcgaagggcgaattc

SEQ ID NO: 100 - protein, 738 aa, Artificial Sequence
  source: /note="Description of Artificial Sequence: Synthetic polypeptide"
MAADGYLPDWLEDNLSEGIREWWDLKPGAPKPKANQQKQDDGRGLVLPGYKYLGPFNGLDKGEPVNAADAAALEHDKAYDQQLKAGDNPYLRYNHADAEFQERLQEDTSFGGNLGRAVFQAKKRVLEPLGLVEEGAKTAPGKKRPVEPSPQRSPDSSTGIGKKGQQPAKKRLNFGQTGDSESVPDPQPIGEPPAGPSGLGSGTMAAGGGAPMADNNEGADGVGSSSGNWHCDSTWLGDRVITTSTRTWALPTYNNHLYKQISNGTSGGSTNDNTYFGYSTPWGYFDFNRFHCHFSPRDWQRLINNNWGFRPKRPNFKLFNIQVKEVTQNEGTKTIANNLTSTIQVFTDSEYQLPYVLGSAHQGCLPPFPADVFMIPQYGYLTLNNGSQAVGRSSFYCLEYFPSQMLRTGNNFEFSYQFEDVPFHSSYAHSQSLDRLMNPLIDQYLYYLSRTQSTGGTAGTQQLLFSQAGPNNMSAQAKNWLPGPCYRQQRVSTTLSQNNNSNFAWTGATKYHLNGRDSLVNPGVAMATHKDDEERFFPSSGVLMFGKQGAGKDNVDYSSVMLTSEEEIKTTNPVATEQYGVVADNLQQQNAAPIVGAVNSQGALPGMVWQNRDVYLQGPIWAKIPHTDGNFHPSPLMGGFGLKHPPPQILIKNTPVPADPPTTFSQAKLASFITQYSTGQVSVEIEWELQKENSKRWNPEIQYTSNYYKSTNVDFAVNTDGTYSEPRPIGTRYLTRNL

SEQ ID NO: 101 - protein, 738 aa, Artificial Sequence
  source: /note="Description of Artificial Sequence: Synthetic polypeptide"
MAADGYLPDWLEDNLSEGIREWWDLKPGAPKPKANQQKQDDGRGLVLPGYKYLGPFNGLDKGEPVNAADAAALEHDKAYDQQLKAGDNPYLRYNHADAEFQERLQEDTSFGGNLGRAVFQAKKRVLEPLGLVEEAAKTAPGKKRPVEPSPQRSPDSSTGIGKKGQQPAKKRLNFGQTGDSESVPDPQPIGEPPAGPSGLGSGTMAAGGGAPMADNNEGADGVGSSSGNWHCDSTWLGDRVITTSTRTWALPTYNNHLYKQISNGTSGGSTNDNTYFGYSTPWGYFDFNRFHCHFSPRDWQRLINNNWGFRPKRLSFKLFNIQVKEVTQNEGTKTIANNLTSTIQVFTDSEYQLPYVLGSAHQGCLPPFPADVFMIPQYGYLTLNNGSQAVGRSSFYCLEYFPSQMLRTGNNFEFSYTFEDVPFHSSYAHSQSLDRLMNPLIDQYLYYLSRTQSTGGTQGTQQLLFSQAGPANMSAQAKNWLPGPCYRQQRVSTTLSQNNNSNFAWTGATKYHLNGRDSLVNPGVAMATHKDDEERFFPSSGVLMFGKQGAGRDNVDYSSVMLTSEEEIKTTNPVATEQYGVVADNLQQTNTGPIVGNVNSQGALPGMVWQNRDVYLQGPIWAKIPHTDGNFHPSPLMGGFGLKHPPPQILIKNTPVPADPPTTFSQAKLASFITQYSTGQVSVEIEWELQKENSKRWNPEIQYTSNYYKSTNVDFAVNTEGTYSEPRPIGTRYLTRNL

SEQ ID NO: 102 - DNA, 2172 bp, Artificial Sequence
  source: /note="Description of Artificial Sequence: Synthetic polynucleotide"
atgtcttttgttgatcaccctccagattggttggaagaagttggtgaaggtcttcgcgagtttttgggccttgaagcgggcccaccgaaaccaaaacccaatcagcagcatcaagatcaagcccgtggtcttgtgctgcctggttataactatctcggacccggaaacggtctcgatcgaggagagcctgtcaacagggcagacgaggtcgcgcgagagcacgacatctcgtacaacgagcagcttgaggcgggagacaacccctacctcaagtacaaccacgcggacgccgagtttcaggagaagctcgccgacgacacatccttcgggggaaacctcggaaaggcagtctttcaggccaagaaaagggttctcgaaccttttggcctggttgaagagggtgctaagacggcccctaccggaaagcggatagacgaccactttccaaaaagaaagaaggctcggaccgaagaggactccaagccttccacctcgtcagacgccgaagctggacccagcggatcccagcagctgcaaatcccagcccaaccagcctcaagtttgggagctgatacaatgtctgcgggaggtggcggcccattgggcgacaataaccaaggtgccgatggagtgggcaatgcctcgggagattggcattgcgattccacgtggatgggggacagagtcgtcaccaagtccacccgaacctgggtgctgcccagctacaacaaccaccagtaccgagagatcaaaagcggctccgtcgacggaagcaacgccaacgcctactttggatacagcaccccctgggggtactttgactttaaccgcttccacagccactggagcccccgagactggcaaagactcatcaacaactactggggcttcagaccccggtccctcagagtcaaaatcttcaacattcaagtcaaagaggtcacggtgcaggactccaccaccaccatcgccaacaacctcacctccaccgtccaagtgtttacggacgacgactaccagctgccctacgtcgtcggcaacgggaccgagggatgcctgccggccttccctccgcaggtctttacgctgccgcagtacggttacgcgacgctgaaccgcgacaacacagaaaatcccaccgagaggagcagcttcttctgcctagagtactttcccagcaagatgctgagaacgggcaacaactttgagtttacctacaactttgaggaggtgcccttccactccagcttcgctcccagtcagaacctgttcaagctggccaacccgctggtggaccagtacttgtaccgcttcgtgagcacaaataacactggcggagtccagttcaacaagaacctggccgggagatacgccaacacctacaaaaactggttcccggggcccatgggccgaacccagggctggaacctgggctccggggtcaaccgcgccagtgtcagcgccttcgccacgaccaataggatggagctcgagggcgcgagttaccaggtgcccccgcagccgaacggcatgaccaacaacctccagggcagcaacacctatgccctggagaacactatgatcttcaacagccagccggcgaacccgggcaccaccgccacgtacctcgagggcaacatgctcatcaccagcgagagcgagacgcagccggtgaaccgcgtggcgtacaacgtcggcgggcagatggccaccaacaaccagagctccaccactgcccccgcgaccggcacgtacaacctccaggaaatcgtgcccggcagcgtgtggatggagagggacgtgtacctccaaggacccatctgggccaagatcccagagacgggggcgcactttcacccctctccggccatgggcggattcggactcaaacacccaccgcccatgatgctcatcaagaacacgcctgtgcccggaaatatcaccagcttctcggacgtgcccgtcagcagcttcatcacccagtacagcaccgggcaggtcaccgtggagatggagtgggagctcaagaaggaaaactccaagaggtggaacccagagatccagtacacaaacaactacaacgacccccagtttgtggactttgccccggacagcaccggggaatacagaaccaccagacctatcggaacccgataccttacccgacccctt

SEQ ID NO: 103 - protein, 720 aa, Artificial Sequence
  source: /note="Description of Artificial Sequence: Synthetic polypeptide"
MSFVDHPPDWLEEVGEGLREFLGLEAGPPKPKPNQQHQDQARGLVLPGYNYLGPGNGLDRGEPVNRADEVAREHDISYNEQLEAGDNPYLKYNHADAEFQEKLADDTSFGGNLGKAVFQAKKRVLEPFGLVEEGAKTAPTGKRIDDHFPKRKKARTEEDSKPSTSSDAEAGPSGSQQLQIPAQPASSLGADTMSAGGGGPLGDNNQGADGVGNASGDWHCDSTWMGDRVVTKSTRTWVLPSYNNHQYREIKSGSVDGSNANAYFGYSTPWGYFDFNRFHSHWSPRDWQRLINNYWGFRPRSLRVKIFNIQVKEVTVQDSTTTIANNLTSTVQVFTDDDYQLPYVVGNGTEGCLPAFPPQVFTLPQYGYATLNRDNTENPTERSSFFCLEYFPSKMLRTGNNFEFTYNFEEVPFHSSFAPSQNLFKLANPLVDQYLYRFVSTNNTGGVQFNKNLAGRYANTYKNWFPGPMGRTQGWNLGSGVNRASVSAFATTNRMELEGASYQVPPQPNGMTNNLQGSNTYALENTMIFNSQPANPGTTATYLEGNMLITSESETQPVNRVAYNVGGQMATNNQSSTTAPATGTYNLQEIVPGSVWMERDVYLQGPIWAKIPETGAHFHPSPAMGGFGLKHPPPMMLIKNTPVPGNITSFSDVPVSSFITQYSTGQVTVEMEWELKKENSKRWNPEIQYTNNYNDPQFVDFAPDSTGEYRTTRPIGTRYL

SEQ ID NO: 104 - protein, 724 aa, Adeno-associated virus 5
MSFVDHPPDWLEEVGEGLREFLGLEAGPPKPKPNQQHQDQARGLVLPGYNYLGPGNGLDRGEPVNRADEVAREHDISYNEQLEAGDNPYLKYNHADAEFQEKLADDTSFGGNLGKAVFQAKKRVLEPFGLVEEGAKTAPTGKRIDDHFPKRKKARTEEDSKPSTSSDAEAGPSGSQQLQIPAQPASSLGADTMSAGGGGPLGDNNQGADGVGNASGDWHCDSTWMGDRVVTKSTRTWVLPSYNNHQYREIKSGSVDGSNANAYFGYSTPWGYFDFNRFHSHWSPRDWQRLINNYWGFRPRSLRVKIFNIQVKEVTVQDSTTTIANNLTSTVQVFTDDDYQLPYVVGNGTEGCLPAFPPQVFTLPQYGYATLNRDNTENPTERSSFFCLEYFPSKMLRTGNNFEFTYNFEEVPFHSSFAPSQNLFKLANPLVDQYLYRFVSTNNTGGVQFNKNLAGRYANTYKNWFPGPMGRTQGWNLGSGVNRASVSAFATTNRMELEGASYQVPPQPNGMTNNLQGSNTYALENTMIFNSQPANPGTTATYLEGNMLITSESETQPVNRVAYNVGGQMATNNQSSTTAPATGTYNLQEIVPGSVWMERDVYLQGPIWAKIPETGAHFHPSPAMGGFGLKHPPPMMLIKNTPVPGNITSFSDVPVSSFITQYSTGQVTVEMEWELKKENSKRWNPEIQYTNNYNDPQFVDFAPDSTGEYRTTRPIGTRYLTRPL

SEQ ID NO: 105 - DNA, 2175 bp, Artificial Sequence
  source: /note="Description of Artificial Sequence: Synthetic polynucleotide"
atgtcttttgttgatcaccctccagattggttggaagaagttggtgaaggtcttcgcgagtttttgggccttgaagcgggcccaccgaaaccaaaacccaatcagcagcatcaagatcaagcccgtggtcttgtgctgcctggttataactatctcggacccggaaacggtctcgatcgaggagagcctgtcaacagggcagacgaggtcgcgcgagagcacgacatctcgtacaacgagcagcttgaggcgggagacaacccctacctcaagtacaaccacgcggacgccgagtttcaggagaagctcgccgacgacacatccttcgggggaaacctcggaaaggcagtctttcaggccaagaaaagggttctcgaaccttttggcctggttgaagagggtgctaagacggcccctaccggaaagcggatagacgaccactttccaaaaagaaagaaggctcggaccgaagaggactccaagccttccacctcgtcagacgccgaagctggacccagcggatcccagcagctgcaaatcccagcccaaccagcctcaagtttgggagctgatacaatgtctgcgggaggtggcggcccattgggcgacaataaccaaggtgccgatggagtgggcaatgcctcgggagattggcattgcgattccacgtggatgggggacagagtcgtcaccaagtccacccgaacctgggtgctgcccagctacaacaaccaccagtaccgagagatcaaaagcggctccgtcgacggaagcaacgccaacgcctactttggatacagcaccccctgggggtactttgactttaaccgcttccacagccactggagcccccgagactggcaaagactcatcaacaactactggggcttcagaccccggtccctcagagtcaaaatcttcaacattcaagtcaaagaggtcacggtgcaggactccaccaccaccatcgccaacaacctcacctccaccgtccaagtgtttacggacgacgactaccagctgccctacgtcgtcggcaacgggaccgagggatgcctgccggccttccctccgcaggtctttacgctgccgcagtacggttacgcgacgctgaaccgcgacaacacagaaaatcccaccgagaggagcagcttcttctgcctagagtactttcccagcaagatgctgagaacgggcaacaactttgagtttacctacaactttgaggaggtgcccttccactccagcttcgctcccagtcagaacctgttcaagctggccaacccgctggtggaccagtacttgtaccgcttcgtgagcacaaataacactggcggagtccagttcaacaagaacctggccgggagatacgccaacacctacaaaaactggttcccggggcccatgggccgaacccagggctggaacctgggctccggggtcaaccgcgccagtgtcagcgccttcgccacgaccaataggatggagctcgagggcgcgagttaccaggtgcccccgcagccgaacggcatgaccaacaacctccagggcagcaacacctatgccctggagaacactatgatcttcaacagccagccggcgaacccgggcaccaccgccacgtacctcgagggcaacatgctcatcaccagcgagagcgagacgcagccggtgaaccgcgtggcgtacaacgtcggcgggcagatggccaccaacaaccagagctccaccactgcccccgcgaccggcacgtacaacctccaggaaatcgtgcccggcagcgtgtggatggagagggacgtgtacctccaaggacccatctgggccaagatcccagagacgggggcgcactttcacccctctccggccatgggcggattcggactcaaacacccaccgcccatgatgctcatcaagaacacgcctgtgcccggaaatatcaccagcttctcggacgtgcccgtcagcagcttcatcacccagtacagcaccgggcaggtcaccgtggagatggagtgggagctcaagaaggaaaactccaagaggtggaacccagagatccagtacacaaacaactacaacgacccccagtttgtggactttgccccggacagcaccggggaatacagaaccaccagacctatcggaacccgataccttacccgacccctttaa

SEQ ID NO: 106 - DNA, 2208 bp, Artificial Sequence
  source: /note="Description of Artificial Sequence: Synthetic polynucleotide"
atggctgccgatggttatcttccagattggctcgaggacaacctctctgagggcattcgcgagtggtgggacttgaaacctggagccccgaaacccaaagccaaccagcaaaagcaggacgacggccggggtctggtgcttcctggctacaagtacctcggacccttcaacggactcgacaagggggagcccgtcaacgcggcggatgcagcggccctcgagcacgacaaggcctacgaccagcagctcaaagcgggtgacaatccgtacctgcggtataaccacgccgacgccgagtttcaggagcgtctgcaagaagatacgtcttttgggggcaacctcgggcgagcagtcttccaggccaagaagagggttctcgaaccttttggtctggttgaggaaggtgctaagacggctcctggaaagaaacgtccggtagagcagtcgccacaagagccagactcctcctcgggcattggcaagacaggccagcagcccgctaaaaagagactcaattttggtcagactggcgactcagagtcagtccccgacccacaacctctcggagaacctccagcaacccccgctgctgtgggacctactacaatggcttcaggcggtggcgcaccaatggcagacaataacgaaggcgccgacggagtgggtaatgcctcaggaaattggcattgcgattccacatggctgggcgacagagtcatcaccaccagcacccgaacatgggccttgcccacctataacaaccacctctacaagcaaatctccagtgcttcaacgggggccagcaacgacaaccactacttcggctacagcaccccctgggggtattttgatttcaacagattccactgccatttctcaccacgtgactggcagcgactcatcaacaacaattggggattccggcccaagagactcaacttcaagctcttcaacatccaagtcaaggaggtcacgacgaatgatggcgtcacgaccatcgctaataaccttaccagcacggttcaagtcttctcggactcggagtaccagttgccgtacgtcctcggctctgcgcaccagggctgcctccctccgttcccggcggacgtgttcatgattccgcagtacggctacctaacgctcaacaatggcagccaggcagtgggacggtcatccttttactgcctggaatatttcccatcgcagatgctgagaacgggcaataactttaccttcagctacaccttcgaggacgtgcctttccacagcagctacgcgcacagccagagcctggaccggctgatgaatcctctcatcgaccagtacctgtattacctgaacagaactcagaatcagtccggaagtgcccaaaacaaggacttgctgtttagccgggggtctccagctggcatgtctgttcagcccaaaaactggctacctggaccctgttaccggcagcagcgcgtttctaaaacaaaaacagacaacaacaacagcaactttacctggactggtgcttcaaaatataaccttaatgggcgtgaatctataatcaaccctggcactgctatggcctcacacaaagacgacaaagacaagttctttcccatgagcggtgtcatgatttttggaaaggagagcgccggagcttcaaacactgcattggacaatgtcatgatcacagacgaagaggaaatcaaagccactaaccccgtggccaccgaaagatttgggactgtggcagtcaatctccagagcagcagcacagaccctgcgaccggagatgtgcatgttatgggagccttacctggaatggtgtggcaagacagagacgtatacctgcagggtcctatttgggccaaaattcctcacacggatggacactttcacccgtctcctctcatgggcggctttggacttaagcacccgcctcctcagatcctcatcaaaaacacgcctgttcctgcgaatcctccggcagagttttcggctacaaagtttgcttcattcatcacccagtattccacaggacaagtgagcgtggagattgaatgggagctgcagaaagaaaacagcaaacgctggaatcccgaagtgcagtatacatctaactatgcaaaatctgccaacgttgatttcactgtggacaacaatggactttatactgagcctcgccccattggcacccgttacctcacccgtcccctg

SEQ ID NO: 107 - protein, 736 aa, Adeno-associated virus 6
MAADGYLPDWLEDNLSEGIREWWDLKPGAPKPKANQQKQDDGRGLVLPGYKYLGPFNGLDKGEPVNAADAAALEHDKAYDQQLKAGDNPYLRYNHADAEFQERLQEDTSFGGNLGRAVFQAKKRVLEPFGLVEEGAKTAPGKKRPVEQSPQEPDSSSGIGKTGQQPAKKRLNFGQTGDSESVPDPQPLGEPPATPAAVGPTTMASGGGAPMADNNEGADGVGNASGNWHCDSTWLGDRVITTSTRTWALPTYNNHLYKQISSASTGASNDNHYFGYSTPWGYFDFNRFHCHFSPRDWQRLINNNWGFRPKRLNFKLFNIQVKEVTTNDGVTTIANNLTSTVQVFSDSEYQLPYVLGSAHQGCLPPFPADVFMIPQYGYLTLNNGSQAVGRSSFYCLEYFPSQMLRTGNNFTFSYTFEDVPFHSSYAHSQSLDRLMNPLIDQYLYYLNRTQNQSGSAQNKDLLFSRGSPAGMSVQPKNWLPGPCYRQQRVSKTKTDNNNSNFTWTGASKYNLNGRESIINPGTAMASHKDDKDKFFPMSGVMIFGKESAGASNTALDNVMITDEEEIKATNPVATERFGTVAVNLQSSSTDPATGDVHVMGALPGMVWQDRDVYLQGPIWAKIPHTDGHFHPSPLMGGFGLKHPPPQILIKNTPVPANPPAEFSATKFASFITQYSTGQVSVEIEWELQKENSKRWNPEVQYTSNYAKSANVDFTVDNNGLYTEPRPIGTRYLTRPL

SEQ ID NO: 108 - protein, 623 aa, Adeno-associated virus 6
MPGFYEIVIKVPSDLDEHLPGISDSFVNWVAEKEWELPPDSDMDLNLIEQAPLTVAEKLQRDFLVQWRRVSKAPEALFFVQFEKGESYFHLHILVETTGVKSMVLGRFLSQIRDKLVQTIYRGIEPTLPNWFAVTKTRNGAGGGNKVVDECYIPNYLLPKTQPELQWAWTNMEEYISACLNLAERKRLVAHDLTHVSQTQEQNKENLNPNSDAPVIRSKTSARYMELVGWLVDRGITSEKQWIQEDQASYISFNAASNSRSQIKAALDNAGKIMALTKSAPDYLVGPAPPADIKTNRIYRILELNGYDPAYAGSVFLGWAQKRFGKRNTIWLFGPATTGKTNIAEAIAHAVPFYGCVNWTNENFPFNDCVDKMVIWWEEGKMTAKVVESAKAILGGSKVRVDQKCKSSAQIDPTPVIVTSNTNMCAVIDGNSTTFEHQQPLQDRMFKFELTRRLEHDFGKVTKQEVKEFFRWAQDHVTEVAHEFYVRKGGANKRPAPDDADKSEPKRACPSVADPSTSDAEGAPVDFADRYQNKCSRHAGMLQMLFPCKTCERMNQNFNICFTHGTRDCSECFPGVSESQPVVRKRTYRKLCAIHHLLGRAPEIACSACDLVNVDLDDCVSEQ

SEQ ID NO: 109 - DNA, 4683 bp, Adeno-associated virus 6
ttggccactccctctctgcgcgctcgctcgctcactgaggccgggcgaccaaaggtcgcccgacgcccgggctttgcccgggcggcctcagtgagcgagcgagcgcgcagagagggagtggccaactccatcactaggggttcctggaggggtggagtcgtgacgtgaattacgtcatagggttagggaggtcctgtattagaggtcacgtgagtgttttgcgacattttgcgacaccatgtggtcacgctgggtatttaagcccgagtgagcacgcagggtctccattttgaagcgggaggtttgaacgcgcagcgccatgccggggttttacgagattgtgattaaggtccccagcgaccttgacgagcatctgcccggcatttctgacagctttgtgaactgggtggccgagaaggaatgggagttgccgccagattctgacatggatctgaatctgattgagcaggcacccctgaccgtggccgagaagctgcagcgcgacttcctggtccagtggcgccgcgtgagtaaggccccggaggccctcttctttgttcagttcgagaagggcgagtcctacttccacctccatattctggtggagaccacgggggtcaaatccatggtgctgggccgcttcctgagtcagattagggacaagctggtgcagaccatctaccgcgggatcgagccgaccctgcccaactggttcgcggtgaccaagacgcgtaatggcgccggaggggggaacaaggtggtggacgagtgctacatccccaactacctcctgcccaagactcagcccgagctgcagtgggcgtggactaacatggaggagtatataagcgcgtgtttaaacctggccgagcgcaaacggctcgtggcgcacgacctgacccacgtcagccagacccaggagcagaacaaggagaatctgaaccccaattctgacgcgcctgtcatccggtcaaaaacctccgcacgctacatggagctggtcgggtggctggtggaccggggcatcacctccgagaagcagtggatccaggaggaccaggcctcgtacatctccttcaacgccgcctccaactcgcggtcccagatcaaggccgctctggacaatgccggcaagatcatggcgctgaccaaatccgcgcccgactacctggtaggccccgctccgcccgccgacattaaaaccaaccgcatttaccgcatcctggagctgaacggctacgaccctgcctacgccggctccgtctttctcggctgggcccagaaaaggttcggaaaacgcaacaccatctggctgtttgggccggccaccacgggcaagaccaacatcgcggaagccatcgcccacgccgtgcccttctacggctgcgtcaactggaccaatgagaactttcccttcaacgattgcgtcgacaagatggtgatctggtgggaggagggcaagatgacggccaaggtcgtggagtccgccaaggccattctcggcggcagcaaggtgcgcgtggaccaaaagtgcaagtcgtccgcccagatcgatcccacccccgtgatcgtcacctccaacaccaacatgtgcgccgtgattgacgggaacagcaccaccttcgagcaccagcagccgttgcaggaccggatgttcaaatttgaactcacccgccgtctggagcatgactttggcaaggtgacaaagcaggaagtcaaagagttcttccgctgggcgcaggatcacgtgaccgaggtggcgcatgagttctacgtcagaaagggtggagccaacaagagacccgcccccgatgacgcggataaaagcgagcccaagcgggcctgcccctcagtcgcggatccatcgacgtcagacgcggaaggagctccggtggactttgccgacaggtaccaaaacaaatgttctcgtcacgcgggcatgcttcagatgctgtttccctgcaaaacatgcgagagaatgaatcagaatttcaacatttgcttcacgcacgggaccagagactgttcagaatgtttccccggcgtgtcagaatctcaaccggtcgtcagaaagaggacgtatcggaaactctgtgccattcatcatctgctggggcgggctcccgagattgcttgctcggcctgcgatctggtcaacgtggatctggatgactgtgtttctgagcaataaatgacttaaaccaggtatggctgccgatggttatcttccagattggctcgaggacaacctctctgagggcattcgcgagtggtgggacttgaaacctggagccccgaaacccaaagccaaccagcaaaagcaggacgacggccggggtctggtgcttcctggctacaagtacctcggacccttcaacggactcgacaagggggagcccgtcaacgcggcggatgcagcggccctcgagcacgacaaggcctacgaccagcagctcaaagcgggtgacaatccgtacctgcggtataaccacgccgacgccgagtttcaggagcgtctgcaagaagatacgtcttttgggggcaacctcgggcgagcagtcttccaggccaagaagagggttctcgaaccttttggtctggttgaggaaggtgctaagacggctcctggaaagaaacgtccggtagagcagtcgccacaagagccagactcctcctcgggcattggcaagacaggccagcagcccgctaaaaagagactcaattttggtcagactggcgactcagagtcagtccccgacccacaacctctcggagaacctccagcaacccccgctgctgtgggacctactacaatggcttcaggcggtggcgcaccaatggcagacaataacgaaggcgccgacggagtgggtaatgcctcaggaaattggcattgcgattccacatggctgggcgacagagtcatcaccaccagcacccgaacatgggccttgcccacctataacaaccacctctacaagcaaatctccagtgcttcaacgggggccagcaacgacaaccactacttcggctacagcaccccctgggggtattttgatttcaacagattccactgccatttctcaccacgtgactggcagcgactcatcaacaacaattggggattccggcccaagagactcaacttcaagctcttcaacatccaagtcaaggaggtcacgacgaatgatggcgtcacgaccatcgctaataaccttaccagcacggttcaagtcttctcggactcggagtaccagttgccgtacgtcctcggctctgcgcaccagggctgcctccctccgttcccggcggacgtgttcatgattccgcagtacggctacctaacgctcaacaatggcagccaggcagtgggacggtcatccttttactgcctggaatatttcccatcgcagatgctgagaacgggcaataactttaccttcagctacaccttcgaggacgtgcctttccacagcagctacgcgcacagccagagcctggaccggctgatgaatcctctcatcgaccagtacctgtattacctgaacagaactcagaatcagtccggaagtgcccaaaacaaggacttgctgtttagccgggggtctccagctggcatgtctgttcagcccaaaaactggctacctggaccctgttaccggcagcagcgcgtttctaaaacaaaaacagacaacaacaacagcaactttacctggactggtgcttcaaaatataaccttaatgggcgtgaatctataatcaaccctggcactgctatggcctcacacaaagacgacaaagacaagttctttcccatgagcggtgtcatgatttttggaaaggagagcgccggagcttcaaacactgcattggacaatgtcatgatcacagacgaagaggaaatcaaagccactaaccccgtggccaccgaaagatttgggactgtggcagtcaatctccagagcagcagcacagaccctgcgaccggagatgtgcatgttatgggagccttacctggaatggtgtggcaagacagagacgtatacctgcagggtcctatttgggccaaaattcctcacacggatggacactttcacccgtctcctctcatgggcggctttggacttaagcacccgcctcctcagatcctcatcaaaaacacgcctgttcctgcgaatcctccggcagagttttcggctacaaagtttgcttcattcatcacccagtattccacaggacaagtgagcgtggagattgaatgggagctgcagaaagaaaacagcaaacgctggaatcccgaagtgcagtatacatctaactatgcaaaatctgccaacgttgatttcactgtggacaacaatggactttatactgagcctcgccccattggcacccgttacctcacccgtcccctgtaattgtgtgttaatcaataaaccggttaattcgtgtcagttgaactttggtctcatgtcgttattatcttatctggtcaccatagcaaccggttacacattaactgcttagttgcgcttcgcgaatacccctagtgatggagttgcccactccctctatgcgcgctcgctcgctcggtggggccggcagagcagagctctgccgtctgcggacctttggtccgcaggccccaccgagcgagcgagcgcgcatagagggagtgggcaa

SEQ ID NO: 110 - DNA, 2211 bp, Artificial Sequence
  source: /note="Description of Artificial Sequence: Synthetic polynucleotide"
atggctgccgatggttatcttccagattggctcgaggacaacctctctgagggcattcgcgagtggtgggacttgaaacctggagccccgaaacccaaagccaaccagcaaaagcaggacgacggccggggtctggtgcttcctggctacaagtacctcggacccttcaacggactcgacaagggggagcccgtcaacgcggcggatgcagcggccctcgagcacgacaaggcctacgaccagcagctcaaagcgggtgacaatccgtacctgcggtataaccacgccgacgccgagtttcaggagcgtctgcaagaagatacgtcttttgggggcaacctcgggcgagcagtcttccaggccaagaagagggttctcgaaccttttggtctggttgaggaaggtgctaagacggctcctggaaagaaacgtccggtagagcagtcgccacaagagccagactcctcctcgggcattggcaagacaggccagcagcccgctaaaaagagactcaattttggtcagactggcgactcagagtcagtccccgacccacaacctctcggagaacctccagcaacccccgctgctgtgggacctactacaatggcttcaggcggtggcgcaccaatggcagacaataacgaaggcgccgacggagtgggtaatgcctcaggaaattggcattgcgattccacatggctgggcgacagagtcatcaccaccagcacccgaacatgggccttgcccacctataacaaccacctctacaagcaaatctccagtgcttcaacgggggccagcaacgacaaccactacttcggctacagcaccccctgggggtattttgatttcaacagattccactgccatttctcaccacgtgactggcagcgactcatcaacaacaattggggattccggcccaagagactcaacttcaagctcttcaacatccaagtcaaggaggtcacgacgaatgatggcgtcacgaccatcgctaataaccttaccagcacggttcaagtcttctcggactcggagtaccagttgccgtacgtcctcggctctgcgcaccagggctgcctccctccgttcccggcggacgtgttcatgattccgcagtacggctacctaacgctcaacaatggcagccaggcagtgggacggtcatccttttactgcctggaatatttcccatcgcagatgctgagaacgggcaataactttaccttcagctacaccttcgaggacgtgcctttccacagcagctacgcgcacagccagagcctggaccggctgatgaatcctctcatcgaccagtacctgtattacctgaacagaactcagaatcagtccggaagtgcccaaaacaaggacttgctgtttagccgggggtctccagctggcatgtctgttcagcccaaaaactggctacctggaccctgttaccggcagcagcgcgtttctaaaacaaaaacagacaacaacaacagcaactttacctggactggtgcttcaaaatataaccttaatgggcgtgaatctataatcaaccctggcactgctatggcctcacacaaagacgacaaagacaagttctttcccatgagcggtgtcatgatttttggaaaggagagcgccggagcttcaaacactgcattggacaatgtcatgatcacagacgaagaggaaatcaaagccactaaccccgtggccaccgaaagatttgggactgtggcagtcaatctccagagcagcagcacagaccctgcgaccggagatgtgcatgttatgggagccttacctggaatggtgtggcaagacagagacgtatacctgcagggtcctatttgggccaaaattcctcacacggatggacactttcacccgtctcctctcatgggcggctttggacttaagcacccgcctcctcagatcctcatcaaaaacacgcctgttcctgcgaatcctccggcagagttttcggctacaaagtttgcttcattcatcacccagtattccacaggacaagtgagcgtggagattgaatgggagctgcagaaagaaaacagcaaacgctggaatcccgaagtgcagtatacatctaactatgcaaaatctgccaacgttgatttcactgtggacaacaatggactttatactgagcctcgccccattggcacccgttacctcacccgtcccctgtaa

SEQ ID NO: 111 - protein, 736 aa, Artificial Sequence; identical to SEQ ID NO: 107
  source: /note="Description of Artificial Sequence: Synthetic polypeptide"

SEQ ID NO: 112 - protein, 736 aa, Artificial Sequence
  source: /note="Description of Artificial Sequence: Synthetic polypeptide"
MAADGYLPDWLEDNLSEGIREWWDLKPGAPKPKANQQKQDDGRGLVLPGYKYLGPFNGLDKGEPVNAADAAALEHDKAYDQQLKAGDNPYLRYNHADAEFQERLQEDTSFGGNLGRAVFQAKKRVLEPFGLVEEGAKTAPGKKRPVEQSPQEPDSSSGIGKTGQQPAKKRLNFGQTGDSESVPDPQPLGEPPATPAAVGPTTMASGGGAPMADNNEGADGVGNASGNWHCDSTWLGDRVITTSTRTWALPTYNNHLYKQISSASTGASNDNHYFGYSTPWGYFDFNRFHCHFSPRDWQRLINNNWGFRPKRLNFKLFNIQVKEVTTNDGVTTIANNLTSTVQVFSDSEYQLPYVLGSAHQGCLPPFPADVFMIPQYGYLTLNNGSQAVGRSSFYCLEYFPSQMLRTGNNFTFSYTFEDVPFHSSYAHSQSLDRLMNPLIDQYLYYLNRTQNQSGSAQNKDLLFSRGSPAGMSVQPKNWLPGPCYRQQRVSKTKTDNNNSNFTWTGASKYNLNGRESIINPGTAMASHKDDEDKFFPMSGVMIFGKESAGASNTALDNVMITDEEEIKATNPVATERFGTVAVNLQSSSTDPATGDVHVMGALPGMVWQDRDVYLQGPIWAKIPHTDGHFHPSPLMGGFGLKHPPPQILIKNTPVPANPPAEFSATKFASFITQYSTGQVSVEIEWELQKENSKRWNPEVQYTSNYAKSANVDFTVDNNGLYTEPRPIGTRYLTRPL

SEQ ID NO: 113 - protein, 736 aa, Artificial Sequence
  source: /note="Description of Artificial Sequence: Synthetic polypeptide"
MAADGYLPDWLEDNLSEGIREWWDLKPGAPKPKANQQKQDDGRGLVLPGYKYLGPFNGLDKGEPVNAADAAALEHDKAYDQQLKAGDNPYLRYNHADAEFQERLQEDTSFGGNLGRAVFQAKKRVLEPLGLVEEGAKTAPGKKRPVEQSPQEPDSSSGIGKTGQQPAKKRLNFGQTGDSESVPDPQPLGEPPATPAAVGPTTMASGGGAPMADNNEGADGVGNASGNWHCDSTWLGDRVITTSTRTWALPTYNNHLYKQISSASTGASNDNHYFGYSTPWGYFDFNRFHCHFSPRDWQRLINNNWGFRPKRLNFKLFNIQVKEVTTNDGVTTIANNLTSTVQVFSDSEYQLPYVLGSAHQGCLPPFPADVFMIPQYGYLTLNNGSQAVGRSSFYCLEYFPSQMLRTGNNFTFSYTFEDVPFHSSYAHSQSLDRLMNPLIDQYLYYLNRTQNQSGSAQNKDLLFSRGSPAGMSVQPKNWLPGPCYRQQRVSKTKTDNNNSNFTWTGASKYNLNGRESIINPGTAMASHKDDEDKFFPMSGVMIFGKESAGASNTALDNVMITDEEEIKATNPVATERFGTVAVNLQSSSTDPATGDVHVMGALPGMVWQDRDVYLQGPIWAKIPHTDGHFHPSPLMGGFGLKHPPPQILIKNTPVPANPPAEFSATKFASFITQYSTGQVSVEIEWELQKENSKRWNPEVQYTSNYAKSANVDFTVDNNGLYTEPRPIGTRYLTRPL

SEQ ID NO: 114 - protein, 736 aa, Artificial Sequence
  source: /note="Description of Artificial Sequence: Synthetic polypeptide"
MAADGYLPDWLEDNLSEGIREWWDLKPGAPKPKANQQKQDDGRGLVLPGYKYLGPFNGLDKGEPVNAADAAALEHDKAYDQQLKAGDNPYLRYNHADAEFQERLQEDTSFGGNLGRAVFQAKKRVLEPLGLVEEGAKTAPGKKRPVEQSPQEPDSSSGIGKTGQQPAKKRLNFGQTGDSESVPDPQPLGEPPATPAAVGPTTMASGGGAPMADNNEGADGVGNASGNWHCDSTWLGDRVITTSTRTWALPTYNNHLYKQISSASTGASNDNHYFGYSTPWGYFDFNRFHCHFSPRDWQRLINNNWGFRPKRLNFKLFNIQVKEVTTNDGVTTIANNLTSTVQVFSDSEYQLPYVLGSAHQGCLPPFPADVFMIPQYGYLTLNNGSQAVGRSSFYCLEYFPSQMLRTGNNFTFSYTFEDVPFHSSYAHSQSLDRLMNPLIDQYLYYLNRTQNQSGSAQNKDLLFSRGSPAGMSVQPKNWLPGPCYRQQRVSKTKTDNNNSNFTWTGASKYNLNGRESIINPGTAMASHKDDKDKFFPMSGVMIFGKESAGASNTALDNVMITDEEEIKATNPVATERFGTVAVNLQSSSTDPATGDVHVMGALPGMVWQDRDVYLQGPIWAKIPHTDGHFHPSPLMGGFGLKHPPPQILIKNTPVPANPPAEFSATKFASFITQYSTGQVSVEIEWELQKENSKRWNPEVQYTSNYAKSANVDFTVDNNGLYTEPRPIGTRYLTRPL

SEQ ID NO: 115 - DNA, 2214 bp, Artificial Sequence
  source: /note="Description of Artificial Sequence: Synthetic polynucleotide"
atggctgccgatggttatcttccagattggctcgaggacaacctctctgagggcattcgcgagtggtgggacctgaaacctggagccccgaaacccaaagccaaccagcaaaagcaggacaacggccggggtctggtgcttcctggctacaagtacctcggacccttcaacggactcgacaagggggagcccgtcaacgcggcggacgcagcggccctcgagcacgacaaggcctacgaccagcagctcaaagcgggtgacaatccgtacctgcggtataaccacgccgacgccgagtttcaggagcgtctgcaagaagatacgtcatttgggggcaacctcgggcgagcagtcttccaggccaagaagcgggttctcgaacctctcggtctggttgaggaaggcgctaagacggctcctgcaaagaagagaccggtagagccgtcacctcagcgttcccccgactcctccacgggcatcggcaagaaaggccagcagcccgccagaaagagactcaatttcggtcagactggcgactcagagtcagtccccgaccctcaacctctcggagaacctccagcagcgccctctagtgtgggatctggtacagtggctgcaggcggtggcgcaccaatggcagacaataacgaaggtgccgacggagtgggtaatgcctcaggaaattggcattgcgattccacatggctgggcgacagagtcattaccaccagcacccgaacctgggccctgcccacctacaacaaccacctctacaagcaaatctccagtgaaactgcaggtagtaccaacgacaacacctacttcggctacagcaccccctgggggtattttgactttaacagattccactgccacttctcaccacgtgactggcagcgactcatcaacaacaactggggattccggcccaagaagctgcggttcaagctcttcaacatccaggtcaaggaggtcacgacgaatgacggcgttacgaccatcgctaataaccttaccagcacgattcaggtattctcggactcggaataccagctgccgtacgtcctcggctctgcgcaccagggctgcctgcctccgttcccggcggacgtcttcatgattcctcagtacggctacctgactctcaacaatggcagtcagtctgtgggacgttcctccttctactgcctggagtacttcccctctcagatgctgagaacgggcaacaactttgagttcagctacagcttcgaggacgtgcctttccacagcagctacgcacacagccagagcctggaccggctgatgaatcccctcatcgaccagtacttgtactacctggccagaacacagagtaacccaggaggcacagctggcaatcgggaactgcagttttaccagggcgggccttcaactatggccgaacaagccaagaattggttacctggaccttgcttccggcaacaaagagtctccaaaacgctggatcaaaacaacaacagcaactttgcttggactggtgccaccaaatatcacctgaacggcagaaactcgttggttaatcccggcgtcgccatggcaactcacaaggacgacgaggaccgctttttcccatccagcggagtcctgatttttggaaaaactggagcaactaacaaaactacattggaaaatgtgttaatgacaaatgaagaagaaattcgtcctactaatcctgtagccacggaagaatacgggatagtcagcagcaacttacaagcggctaatactgcagcccagacacaagttgtcaacaaccagggagccttacctggcatggtctggcagaaccgggacgtgtacctgcagggtcccatctgggccaagattcctcacacggatggcaactttcacccgtctcctttgatgggcggctttggacttaaacatccgcctcctcagatcctgatcaagaacactcccgttcccgctaatcctccggaggtgtttactcctgccaagtttgcttcgttcatcacacagtacagcaccggacaagtcagcgtggaaatcgagtgggagctgcagaaggaaaacagcaagcgctggaacccggagattcagtacacctccaactttgaaaagcagactggtgtggactttgccgttgacagccagggtgtttactctgagcctcgccctattggcactcgttacctcacccgtaatctgtaa

SEQ ID NO: 116 - protein, 738 aa, Artificial Sequence
  source: /note="Description of Artificial Sequence: Synthetic polypeptide"
MAADGYLPDWLEDNLSEGIREWWALKPGAPKPKANQQKQDDGRGLVLPGYKYLGPFNGLDKGEPVNAADAAALEHDKAYDQQLQAGDNPYLRYNHADAEFQERLQEDTSFGGNLGRAVFQAKKRVLEPLGLVEEGAKTAPGKKRPVEPSPQRSPDSSTGIGKKGQQPARKRLNFGQTGDSESVPDPQPLGEPPAAPSGVGPNTMAAGGGAPMADNNEGADGVGSSSGNWHCDSTWLGDRVITTSTRTWALPTYNNHLYKQISNGTSGGATNDNTYFGYSTPWGYFDFNRFHCHFSPRDWQRLINNNWGFRPKRLSFKLFNIQVKEVTQNEGTKTIANNLTSTIQVFTDSEYQLPYVLGSAHQGCLPPFPADVFMIPQYGYLTLNNGSQAVGRSSFYCLEYFPSQMLRTGNNFQFTYTFEDVPFHSSYAHSQSLDRLMNPLIDQYLYYLSRTQTTGGTANTQTLGFSQGGPNTMANQAKNWLPGPCYRQQRVSTTTGQNNNSNFAWTAGTKYHLNGRNSLANPGIAMATHKDDEERFFPSNGILIFGKQNAARDNADYSDVMLTSEEEIKTTNPVATEEYGIVADNLQQQNTAPQIGTVNSQGALPGMVWQNRDVYLQGPIWAKIPHTDGNFHPSPLMGGFGLKHPPPQILIKNTPVPADPPTTFNQSKLNSFITQYSTGQVSVEIEWELQKENSKRWNPEIQYTSNYYKSTSVDFAVNTEGVYSEPRPIGTRYLTRNL

SEQ ID NO: 117 - protein, 737 aa, Adeno-associated virus 7
MAADGYLPDWLEDNLSEGIREWWDLKPGAPKPKANQQKQDNGRGLVLPGYKYLGPFNGLDKGEPVNAADAAALEHDKAYDQQLKAGDNPYLRYNHADAEFQERLQEDTSFGGNLGRAVFQAKKRVLEPLGLVEEGAKTAPAKKRPVEPSPQRSPDSSTGIGKKGQQPARKRLNFGQTGDSESVPDPQPLGEPPAAPSSVGSGTVAAGGGAPMADNNEGADGVGNASGNWHCDSTWLGDRVITTSTRTWALPTYNNHLYKQISSETAGSTNDNTYFGYSTPWGYFDFNRFHCHFSPRDWQRLINNNWGFRPKKLRFKLFNIQVKEVTTNDGVTTIANNLTSTIQVFSDSEYQLPYVLGSAHQGCLPPFPADVFMIPQYGYLTLNNGSQSVGRSSFYCLEYFPSQMLRTGNNFEFSYSFEDVPFHSSYAHSQSLDRLMNPLIDQYLYYLARTQSNPGGTAGNRELQFYQGGPSTMAEQAKNWLPGPCFRQQRVSKTLDQNNNSNFAWTGATKYHLNGRNSLVNPGVAMATHKDDEDRFFPSSGVLIFGKTGATNKTTLENVLMTNEEEIRPTNPVATEEYGIVSSNLQAANTAAQTQVVNNQGALPGMVWQNRDVYLQGPIWAKIPHTDGNFHPSPLMGGFGLKHPPPQILIKNTPVPANPPEVFTPAKFASFITQYSTGQVSVEIEWELQKENSKRWNPEIQYTSNFEKQTGVDFAVDSQGVYSEPRPIGTRYLTRNL

SEQ ID NO: 118 - protein, 623 aa, Adeno-associated virus 7
MPGFYEIVIKVPSDLDEHLPGISDSFVNWVAEKEWELPPDSDMDLNLIEQAPLTVAEKLQRDFLVQWRRVSKAPEALFFVQFEKGESYFHLHVLVETTGVKSMVLGRFLSQIREKLVQTIYRGVEPTLPNWFAVTKTRNGAGGGNKVVDECYIPNYLLPKTQPELQWAWTNMEEYISACLNLAERKRLVAQHLTHVSQTQEQNKENLNPNSDAPVIRSKTSARYMELVGWLVDRGITSEKQWIQEDQASYISFNAASNSRSQIKAALDNAGKIMALTKSAPDYLVGPSLPADIKTNRIYRILELNGYDPAYAGSVFLGWAQKKFGKRNTIWLFGPATTGKTNIAEAIAHAVPFYGCVNWTNENFPFNDCVDKMVIWWEEGKMTAKVVESAKAILGGSKVRVDQKCKSSAQIDPTPVIVTSNTNMCAVIDGNSTTFEHQQPLQDRMFKFELTRRLEHDFGKVTKQEVKEFFRWASDHVTEVAHEFYVRKGGASKRPAPDDADISEPKRACPSVADPSTSDAEGAPVDFADRYQNKCSRHAGMIQMLFPCKTCERMNQNFNICFTHGVRDCLECFPGVSESQPVVRKKTYRKLCAIHHLLGRAPEIACSACDLVNVDLDDCVSEQ

SEQ ID NO: 119 - DNA, 4721 bp, Adeno-associated virus 7
ttggccactccctctatgcgcgctcgctcgctcggtggggcctgcggaccaaaggtccgcagacggcagagctctgctctgccggccccaccgagcgagcgagcgcgcatagagggagtggccaactccatcactaggggtaccgcgaagcgcctcccacgctgccgcgtcagcgctgacgtaaatcacgtcataggggagtggtcctgtattagctgtcacgtgagtgcttttgcgacattttgcgacaccacgtggccatttgaggtatatatggccgagtgagcgagcaggatctccattttgaccgcgaaatttgaacgagcagcagccatgccgggtttctacgagatcgtgatcaaggtgccgagcgacctggacgagcacctgccgggcatttctgactcgtttgtgaactgggtggccgagaaggaatgggagctgcccccggattctgacatggatctgaatctgatcgagcaggcacccctgaccgtggccgagaagctgcagcgcgacttcctggtccaatggcgccgcgtgagtaaggccccggaggccctgttctttgttcagttcgagaagggcgagagctacttccaccttcacgttctggtggagaccacgggggtcaagtccatggtgctaggccgcttcctgagtcagattcgggagaagctggtccagaccatctaccgcggggtcgagcccacgctgcccaactggttcgcggtgaccaagacgcgtaatggcgccggcggggggaacaaggtggtggacgagtgctacatccccaactacctcctgcccaagacccagcccgagctgcagtgggcgtggactaacatggaggagtatataagcgcgtgtttgaacctggccgaacgcaaacggctcgtggcgcagcacctgacccacgtcagccagacgcaggagcagaacaaggagaatctgaaccccaattctgacgcgcccgtgatcaggtcaaaaacctccgcgcgctacatggagctggtcgggtggctggtggaccggggcatcacctccgagaagcagtggatccaggaggaccaggcctcgtacatctccttcaacgccgcctccaactcgcggtcccagatcaaggccgcgctggacaatgccggcaagatcatggcgctgaccaaatccgcgcccgactacctggtggggccctcgctgcccgcggacattaaaaccaaccgcatctaccgcatcctggagctgaacgggtacgatcctgcctacgccggctccgtctttctcggctgggcccagaaaaagttcgggaagcgcaacaccatctggctgtttgggcccgccaccaccggcaagaccaacattgcggaagccatcgcccacgccgtgcccttctacggctgcgtcaactggaccaatgagaactttcccttcaacgattgcgtcgacaagatggtgatctggtgggaggagggcaagatgacggccaaggtcgtggagtccgccaaggccattctcggcggcagcaaggtgcgcgtggaccaaaagtgcaagtcgtccgcccagatcgaccccacccccgtgatcgtcacctccaacaccaacatgtgcgccgtgattgacgggaacagcaccaccttcgagcaccagcagccgttgcaggaccggatgttcaaatttgaactcacccgccgtctggagcacgactttggcaaggtgacgaagcaggaagtcaaagagttcttccgctgggccagtgatcacgtgaccgaggtggcgcatgagttctacgtcagaaagggcggagccagcaaaagacccgcccccgatgacgcggatataagcgagcccaagcgggcctgcccctcagtcgcggatccatcgacgtcagacgcggaaggagctccggtggactttgccgacaggtaccaaaacaaatgttctcgtcacgcgggcatgattcagatgctgtttccctgcaaaacgtgcgagagaatgaatcagaatttcaacatttgcttcacacacggggtcagagactgtttagagtgtttccccggcgtgtcagaatctcaaccggtcgtcagaaaaaagacgtatcggaaactctgcgcgattcatcatctgctggggcgggcgcccgagattgcttgctcggcctgcgacctggtcaacgtggacctggacgactgcgtttctgagcaataaatgacttaaaccaggtatggctgccgatggttatcttccagattggctcgaggacaacctctctgagggcattcgcgagtggtgggacctgaaacctggagccccgaaacccaaagccaaccagcaaaagcaggacaacggccggggtctggtgcttcctggctacaagtacctcggacccttcaacggactcgacaagggggagcccgtcaacgcggcggacgcagcggccctcgagcacgacaaggcctacgaccagcagctcaaagcgggtgacaatccgtacctgcggtataaccacgccgacgccgagtttcaggagcgtctgcaagaagatacgtcatttgggggcaacctcgggcgagcagtcttccaggccaagaagcgggttctcgaacctctcggtctggttgaggaaggcgctaagacggctcctgcaaagaagagaccggtagagccgtcacctcagcgttcccccgactcctccacgggcatcggcaagaaaggccagcagcccgccagaaagagactcaatttcggtcagactggcgactcagagtcagtccccgaccctcaacctctcggagaacctccagcagcgccctctagtgtgggatctggtacagtggctgcaggcggtggcgcaccaatggcagacaataacgaaggtgccgacggagtgggtaatgcctcaggaaattggcattgcgattccacatggctgggcgacagagtcattaccaccagcacccgaacctgggccctgcccacctacaacaaccacctctacaagcaaatctccagtgaaactgcaggtagtaccaacgacaacacctacttcggctacagcaccccctgggggtattttgactttaacagattccactgccacttctcaccacgtgactggcagcgactcatcaacaacaactggggattccggcccaagaagctgcggttcaagctcttcaacatccaggtcaaggaggtcacgacgaatgacggcgttacgaccatcgctaataaccttaccagcacgattcaggtattctcggactcggaataccagctgccgtacgtcctcggctctgcgcaccagggctgcctgcctccgttcccggcggacgtcttcatgattcctcagtacggctacctgactctcaacaatggcagtcagtctgtgggacgttcctccttctactgcctggagtacttcccctctcagatgctgagaacgggcaacaactttgagttcagctacagcttcgaggacgtgcctttccacagcagctacgcacacagccagagcctggaccggctgatgaatcccctcatcgaccagtacttgtactacctggccagaacacagagtaacccaggaggcacagctggcaatcgggaactgcagttttaccagggcgggccttcaactatggccgaacaagccaagaattggttacctggaccttgcttccggcaacaaagagtctccaaaacgctggatcaaaacaacaacagcaactttgcttggactggtgccaccaaatatcacctgaacggcagaaactcgttggttaatcccggcgtcgccatggcaactcacaaggacgacgaggaccgctttttcccatccagcggagtcctgatttttggaaaaactggagcaactaacaaaactacattggaaaatgtgttaatgacaaatgaagaagaaattcgtcctactaatcctgtagccacggaagaatacgggatagtcagcagcaacttacaagcggctaatactgcagcccagacacaagttgtcaacaaccagggagccttacctggcatggtctggcagaaccgggacgtgtacctgcagggtcccatctgggccaagattcctcacacggatggcaactttcacccgtctcctttgatgggcggctttggacttaaacatccgcctcctcagatcctgatcaagaacactcccgttcccgctaatcctccggaggtgtttactcctgccaagtttgcttcgttcatcacacagtacagcaccggacaagtcagcgtggaaatcgagtgggagctgcagaaggaaaacagcaagcgctggaacccggagattcagtacacctccaactttgaaaagcagactggtgtggactttgccgttgacagccagggtgtttactctgagcctcgccctattggcactcgttacctcacccgtaatctgtaattgcatgttaatcaataaaccggttgattcgtttcagttgaactttggtctcctgtgcttcttatcttatcggtttccatagcaactggttacacattaactgcttgggtgcgcttcacgataagaacactgacgtcaccgcggtacccctagtgatggagttggccactccctctatgcgcgctcgctcgctcggtggggcctgcggaccaaaggtccgcagacggcagagctctgctctgccggccccaccgagcgagcgagcgcgcatagagggagtggccaa

SEQ ID NO: 120 - DNA, 2214 bp, Artificial Sequence; identical to SEQ ID NO: 115
  source: /note="Description of Artificial Sequence: Synthetic polynucleotide"

SEQ ID NO: 121 - protein, 737 aa, Artificial Sequence; identical to SEQ ID NO: 117
  source: /note="Description of Artificial Sequence: Synthetic polypeptide"

SEQ ID NO: 122 - DNA, 2217 bp, Artificial Sequence
  source: /note="Description of Artificial Sequence: Synthetic polynucleotide"
atggctgccgatggttatcttccagattggctcgaggacaacctctctgagggcattcgcgagtggtgggcgctgaaacctggagccccgaagcccaaagccaaccagcaaaagcaggacgacggccggggtctggtgcttcctggctacaagtacctcggacccttcaacggactcgacaagggggagcccgtcaacgcggcggacgcagcggccctcgagcacgacaaggcctacgaccagcagctgcaggcgggtgacaatccgtacctgcggtataaccacgccgacgccgagtttcaggagcgtctgcaagaagatacgtcttttgggggcaacctcgggcgagcagtcttccaggccaagaagcgggttctcgaacctctcggtctggttgaggaaggcgctaagacggctcctggaaagaagagaccggtagagccatcaccccagcgttctccagactcctctacgggcatcggcaagaaaggccaacagcccgccagaaaaagactcaattttggtcagactggcgactcagagtcagttccagaccctcaacctctcggagaacctccagcagcgccctctggtgtgggacctaatacaatggctgcaggcggtggcgcaccaatggcagacaataacgaaggcgccgacggagtgggtagttcctcgggaaattggcattgcgattccacatggctgggcgacagagtcatcaccaccagcacccgaacctgggccctgcccacctacaacaaccacctctacaagcaaatctccaacgggacatcgggaggagccaccaacgacaacacctacttcggctacagcaccccctgggggtattttgactttaacagattccactgccacttttcaccacgtgactggcagcgactcatcaacaacaactggggattccggcccaagagactcagcttcaagctcttcaacatccaggtcaaggaggtcacgcagaatgaaggcaccaagaccatcgccaataacctcaccagcaccatccaggtgtttacggactcggagtaccagctgccgtacgttctcggctctgcccaccagggctgcctgcctccgttcccggcggacgtgttcatgattccccagtacggctacctaacactcaacaacggtagtcaggccgtgggacgctcctccttctactgcctggaatactttccttcgcagatgctgagaaccggcaacaacttccagtttacttacaccttcgaggacgtgcctttccacagcagctacgcccacagccagagcttggaccggctgatgaatcctctgattgaccagtacctgtactacttgtctcggactcaaacaacaggaggcacggcaaatacgcagactctgggcttcagccaaggtgggcctaatacaatggccaatcaggcaaagaactggctgccaggaccctgttaccgccaacaacgcgtctcaacgacaaccgggcaaaacaacaatagcaactttgcctggactgctgggaccaaataccatctgaatggaagaaattcattggctaatcctggcatcgctatggcaacacacaaagacgacgaggagcgtttttttcccagtaacgggatcctgatttttggcaaacaaaatgctgccagagacaatgcggattacagcgatgtcatgctcaccagcgaggaagaaatcaaaaccactaaccctgtggctacagaggaatacggtatcgtggcagataacttgcagcagcaaaacacggctcctcaaattggaactgtcaacagccagggggccttacccggtatggtctggcagaaccgggacgtgtacctgcagggtcccatctgggccaagattcctcacacggacggcaacttccacccgtctccgctgatgggcggctttggcctgaaacatcctccgcctcagatcctgatcaagaacacgcctgtacctgcggatcctccgaccaccttcaaccagtcaaagctgaactctttcatcacgcaatacagcaccggacaggtcagcgtggaaattgaatgggagctgcagaaggaaaacagcaagcgctggaaccccgagatccagtacacctccaactactacaaatctacaagtgtggactttgctgttaatacagaaggcgtgtactctgaaccccgccccattggcacccgttacctcacccgtaatctgtaa

SEQ ID NO: 123 - DNA, 2213 bp, Adeno-associated virus 8
atggctgccgatggttatcttccagattggctcgaggacaacctctctgagggcattcgcgagtggtgggcgctgaaacctggagccccgaagcccaaagccaaccagcaaaagcaggacgacggccggggtctggtgcttcctggctacaagtacctcggacccttcaacggactcgacaagggggagcccgtcaacgcggcggacgcagcggccctcgagcacgacaaggcctacgaccagcagctgcaggcgggtgacaatccgtacctgcggtataaccacgccgacgccgagtttcaggagcgtctgcaagaagatacgtcttttgggggcaacctcgggcgagcagtcttccaggccaagaagcgggttctcgaacctctcggtctggttgaggaaggcgctaagacggctcctggaaagaagagaccggtagagccatcaccccagcgttctccagactcctctacgggcatcggcaagaaaggccaacagcccgccagaaaaagactcaattttggtcagactggcgactcagagtcagttccagaccctcaacctctcggagaacctccagcagcgccctctggtgtgggacctaatacaatggctgcaggcggtggcgcaccaatggcagacaataacgaaggcgccgacggagtgggtagttcctcgggaaattggcattgcgattccacatggctgggcgacagagtcatcaccaccagcacccgaacctgggccctgcccacctacaacaaccacctctacaagcaaatctccaacgggacatcgggaggagccaccaacgacaacacctacttcggctacagcaccccctgggggtattttgactttaacagattccactgccacttttcaccacgtgactggcagcgactcatcaacaacaactggggattccggcccaagagactcagcttcaagctcttcaacatccaggtcaaggaggtcacgcagaatgaaggcaccaagaccatcgccaataacctcaccagcaccatccaggtgtttacggactcggagtaccagctgccgtacgttctcggctctgcccaccagggctgcctgcctccgttcccggcggacgtgttcatgattccccagtacggctacctaacactcaacaacggtagtcaggccgtgggacgctcctccttctactgcctggaatactttccttcgcagatgctgagaaccggcaacaacttccagtttacttacaccttcgaggacgtgcctttccacagcagctacgcccacagccagagcttggaccggctgatgaatcctctgattgaccagtacctgtactacttgtctcggactcaaacaacaggaggcacggcaaatacgcagactctgggcttcagccaaggtgggcctaatacaatggccaatcaggcaaagaactggctgccaggaccctgttaccgccaacaacgcgtctcaacgacaaccgggcaaaacaacaatagcaactttgcctggactgctgggaccaaataccatctgaatggaagaaattcattggctaatcctggcatcgctatggcaacacacaaagacgacgaggagcgtttttttcccagtaacgggatcctgatttttggcaaacaaaatgctgccagagacaatgcggattacagcgatgtcatgctcaccagcgaggaagaaatcaaaaccactaaccctgtggctacagaggaatacggtatcgtggcagataacttgcagcagcaaaacacggctcctcaaattggaactgtcaacagccagggggccttacccggtatggtctggcagaaccgggacgtgtacctgcagggtcccatctgggccaagattcctcacacggacggcaacttccacccgtctccgctgatgggcggctttggcctgaaacatcctccgcctcagatcctgatcaagaacacgcctgtacctgcggatcctccgaccaccttcaaccagtcaaagctgaactctttcatcacgcaatacagcaccggacaggtcagcgtggaaattgaatgggagctgcagaaggaaaacagcaagcgctggaaccccgagatccagtacacctccaactactacaaatctacaagtgtggactttgctgtaatacagaaggcgtgtactctgaaccccgccccattggcacccgttacctcacccgtaatctg

SEQ ID NO: 124 - DNA, 4393 bp, Adeno-associated virus 8
cagagagggagtggccaactccatcactaggggtagcgcgaagcgcctcccacgctgccgcgtcagcgctgacgtaaattacgtcataggggagtggtcctgtattagctgtcacgtgagtgcttttgcggcattttgcgacaccacgtggccatttgaggtatatatggccgagtgagcgagcaggatctccattttgaccgcgaaatttgaacgagcagcagccatgccgggcttctacgagatcgtgatcaaggtgccgagcgacctggacgagcacctgccgggcatttctgactcgtttgtgaactgggtggccgagaaggaatgggagctgcccccggattctgacatggatcggaatctgatcgagcaggcacccctgaccgtggccgagaagctgcagcgcgacttcctggtccaatggcgccgcgtgagtaaggccccggaggccctcttctttgttcagttcgagaagggcgagagctactttcacctgcacgttctggtcgagaccacgggggtcaagtccatggtgctaggccgcttcctgagtcagattcgggaaaagcttggtccagaccatctacccgcggggtcgagccccaccttgcccaactggttcgcggtgaccaaagacgcggtaatggcgccggcgggggggaacaaggtggtggacgagtgctacatccccaactacctcctgcccaagactcagcccgagctgcagtgggcgtggactaacatggaggagtatataagcgcgtgcttgaacctggccgagcgcaaacggctcgtggcgcagcacctgacccacgtcagccagacgcaggagcagaacaaggagaatctgaaccccaattctgacgcgcccgtgatcaggtcaaaaacctccgcgcgctatatggagctggtcgggtggctggtggaccggggcatcacctccgagaagcagtggatccaggaggaccaggcctcgtacatctccttcaacgccgcctccaactcgcggtcccagatcaaggccgcgctggacaatgccggcaagatcatggcgctgaccaaatccgcgcccgactacctggtggggccctcgctgcccgcggacattacccagaaccgcatctaccgcatcctcgctctcaacggctacgaccctgcctacgccggctccgtctttctcggctgggctcagaaaaagttcgggaaacgcaacaccatctggctgtttggacccgccaccaccggcaagaccaacattgcggaagccatcgcccacgccgtgcccttctacggctgcgtcaactggaccaatgagaactttcccttcaatgattgcgtcgacaagatggtgatctggtgggaggagggcaagatgacggccaaggtcgtggagtccgccaaggccattctcggcggcagcaaggtgcgcgtggaccaaaagtgcaagtcgtccgcccagatcgaccccacccccgtgatcgtcacctccaacaccaacatgtgcgccgtgattgacgggaacagcaccaccttcgagcaccagcagcctctccaggaccggatgtttaagttcgaactcacccgccgtctggagcacgactttggcaaggtgacaaagcaggaagtcaaagagttcttccgctgggccagtgatcacgtgaccgaggtggcgcatgagttttacgtcagaaagggcggagccagcaaaagacccgcccccgatgacgcggataaaagcgagcccaagcgggcctgcccctcagtcgcggatccatcgacgtcagacgcggaaggagctccggtggactttgccgacaggtaccaaaacaaatgttctcgtcacgcgggcatgcttcagatgctgtttccctgcaaaacgtgcgagagaatgaatcagaatttcaacatttgcttcacacacggggtcagagactgctcagagtgtttccccggcgtgtcagaatctcaaccggtcgtcagaaagaggacgtatcggaaactctgtgcgattcatcatctgctggggcgggctcccgagattgcttgctcggcctgcgatctggtcaacgtggacctggatgactgtgtttctgagcaataaatgacttaaaccaggtatggctgccgatggttatcttccagattggctcgaggacaacctctctgagggcattcgcgagtggtgggcgctgaaacctggagccccgaagcccaaagccaaccagcaaaagcaggacgacggccggggtctggtgcttcctggctacaagtacctcggacccttcaacggactcgacaagggggagcccgtcaacgcggcggacgcagcggccctcgagcacgacaaggcctacgaccagcagctgcaggcgggtgacaatccgtacctgcggtataaccacgccgacgccgagtttcaggagcgtctgcaagaagatacgtcttttgggggcaacctcgggcgagcagtcttccaggccaagaagcgggttctcgaacctctcggtctggttgaggaaggcgctaagacggctcctggaaagaagagaccggtagagccatcaccccagcgttctccagactcctctacgggcatcggcaagaaaggccaacagcccgccagaaaaagactcaattttggtcagactggcgactcagagtcagttccagaccctcaacctctcggagaacctccagcagcgccctctggtgtgggacctaatacaatggctgcaggcggtggcgcaccaatggcagacaataacgaaggcgccgacggagtgggtagttcctcgggaaattggcattgcgattccacatggctgggcgacagagtcatcaccaccagcacccgaacctgggccctgcccacctacaacaaccacctctacaagcaaatctccaacgggacatcgggaggagccaccaacgacaacacctacttcggctacagcaccccctgggggtattttgactttaacagattccactgccacttttcaccacgtgactggcagcgactcatcaacaacaactggggattccggcccaagagactcagcttcaagctcttcaacatccaggtcaaggaggtcacgcagaatgaaggcaccaagaccatcgccaataacctcaccagcaccatccaggtgtttacggactcggagtaccagctgccgtacgttctcggctctgcccaccagggctgcctgcctccgttcccggcggacgtgttcatgattccccagtacggctacctaacactcaacaacggtagtcaggccgtgggacgctcctccttctactgcctggaatactttccttcgcagatgctgagaaccggcaacaacttccagtttacttacaccttcgaggacgtgcctttccacagcagctacgcccacagccagagcttggaccggctgatgaatcctctgattgaccagtacctgtactacttgtctcggactcaaacaacaggaggcacggcaaatacgcagactctgggcttcagccaaggtgggcctaatacaatggccaatcaggcaaagaactggctgccaggaccctgttaccgccaacaacgcgtctcaacgacaaccgggcaaaacaacaatagcaactttgcctggactgctgggaccaaataccatctgaatggaagaaattcattggctaatcctggcatcgctatggcaacacacaaagacgacgaggagcgtttttttcccagtaacgggatcctgatttttggcaaacaaaatgctgccagagacaatgcggattacagcgatgtcatgctcaccagcgaggaagaaatcaaaaccactaaccctgtggctacagaggaatacggtatcgtggcagataacttgcagcagcaaaacacggctcctcaaattggaactgtcaacagccagggggccttacccggtatggtctggcagaaccgggacgtgtacctgcagggtcccatctgggccaagattcctcacacggacggcaacttccacccgtctccgctgatgggcggctttggcctgaaacatcctccgcctcagatcctgatcaagaacacgcctgtacctgcggatcctccgaccaccttcaaccagtcaaagctgaactctttcatcacgcaatacagcaccggacaggtcagcgtggaaattgaatgggagctgcagaaggaaaacagcaagcgctggaaccccgagatccagtacacctccaactactacaaatctacaagtgtggactttgctgttaatacagaaggcgtgtactctgaaccccgccccattggcacccgttacctcacccgtaatctgtaattgcctgttaatcaataaaccggttgattcgtttcagttgaactttggtctctgcg

SEQ ID NO: 125 - protein, 738 aa, Adeno-associated virus 8; identical to SEQ ID NO: 116

SEQ ID NO: 126 - protein, 737 aa, Adeno-associated virus 8
MAADGYLPDWLEDNLSEGIREWWALKPGAPKPKANQQKQDDGRGLVLPGYKYLGPFNGLDKGEPVNAADAAALEHDKAYDQQLQAGDNPYLRYNHADAEFQERLQEDTSFGGNLGRAVFQAKKRVLEPLGLVEEGAKTAPGKKRPVEPSPQRSPDSSTGIGKKGQQPARKRLNFGQTGDSESVPDPQPLGEPPAAPSGVGPNTMAAGGGAPMADNNEGADGVGSSSGNWHCDSTWLGDRVITTSTRTWALPTYNNHLYKQISNGTSGGATNDNTYFGYSTPWGYFDFNRFHCHFSPRDWQRLINNNWGFRPKRLSFKLFNIQVKEVTQNEGTKTIANNLTSTIQVFTDSEYQLPYVLGSAHQGCLPPFPADVFMIPQYGYLTLNNGSQAVGRSSFYCLEYFPSQMLRTGNNFQFTYTFEDVPFHSSYAHSQSLDRLMNPLIDQYLYYLSRTQTTGGTANTQTLGFSQGGPNTMANQAKNWLPGPCYRQQRVSTTTGQNNNSNFAWTAGTKYHLNGRNSLANPGIAMATHKDDEERFFPSNGILIFGKQNAARDNADYSDVMLTSEEEIKTTNPVATEEYGIVADNLQQQNTAPQIGTVNSQGALPGMVWQNRDVYLQGPIWAKIPHTDGNFHPSPLMGGFGLKHPPPQILIKNTPVPADPPTTFNQSKLNSFITQYSTGQVSVEIEWELQKENSKRWNPEIQYTSNYYKSTSVDFAVIQKACTLNPAPLAPVTSPVI

SEQ ID NO: 127 - DNA, 2217 bp, Artificial Sequence; identical to SEQ ID NO: 122
  source: /note="Description of Artificial Sequence: Synthetic polynucleotide"

SEQ ID NO: 128 - DNA, 2214 bp, Artificial Sequence
  source: /note="Description of Artificial Sequence: Synthetic polynucleotide"
atggctgccgatggttatcttccagattggctcgaggacaacctctctgagggcattcgcgagtggtgggcgctgaaacctggagccccgaagcccaaagccaaccagcaaaagcaggacgacggccggggtctggtgcttcctggctacaagtacctcggacccttcaacggactcgacaagggggagcccgtcaacgcggcggacgcagcggccctcgagcacgacaaggcctacgaccagcagctgcaggcgggtgacaatccgtacctgcggtataaccacgccgacgccgagtttcaggagcgtctgcaagaagatacgtcttttgggggcaacctcgggcgagcagtcttccaggccaagaagcgggttctcgaacctctcggtctggttgaggaaggcgctaagacggctcctggaaagaagagaccggtagagccatcaccccagcgttctccagactcctctacgggcatcggcaagaaaggccaacagcccgccagaaaaagactcaattttggtcagactggcgactcagagtcagttccagaccctcaacctctcggagaacctccagcagcgccctctggtgtgggacctaatacaatggctgcaggcggtggcgcaccaatggcagacaataacgaaggcgccgacggagtgggtagttcctcgggaaattggcattgcgattccacatggctgggcgacagagtcatcaccaccagcacccgaacctgggccctgcccacctacaacaaccacctctacaagcaaatctccaacgggacatcgggaggagccaccaacgacaacacctacttcggctacagcaccccctgggggtattttgactttaacagattccactgccacttttcaccacgtgactggcagcgactcatcaacaacaactggggattccggcccaagagactcagcttcaagctcttcaacatccaggtcaaggaggtcacgcagaatgaaggcaccaagaccatcgccaataacctcaccagcaccatccaggtgtttacggactcggagtaccagctgccgtacgttctcggctctgcccaccagggctgcctgcctccgttcccggcggacgtgttcatgattccccagtacggctacctaacactcaacaacggtagtcaggccgtgggacgctcctccttctactgcctggaatactttccttcgcagatgctgagaaccggcaacaacttccagtttacttacaccttcgaggacgtgcctttccacagcagctacgcccacagccagagcttggaccggctgatgaatcctctgattgaccagtacctgtactacttgtctcggactcaaacaacaggaggcacggcaaatacgcagactctgggcttcagccaaggtgggcctaatacaatggccaatcaggcaaagaactggctgccaggaccctgttaccgccaacaacgcgtctcaacgacaaccgggcaaaacaacaatagcaactttgcctggactgctgggaccaaataccatctgaatggaagaaattcattggctaatcctggcatcgctatggcaacacacaaagacgacgaggagcgtttttttcccagtaacgggatcctgatttttggcaaacaaaatgctgccagagacaatgcggattacagcgatgtcatgctcaccagcgaggaagaaatcaaaaccactaaccctgtggctacagaggaatacggtatcgtggcagataacttgcctgagcggacggcgatgagtcttccgggaactgtcaacagccagggggccttacccggtatggtctggcagaaccgggacgtgtacctgcagggtcccatctgggccaagattcctcacacggacggcaacttccacccgtctccgctgatgggcggctttggcctgaaacatcctccgcctcagatcctgatcaagaacacgcctgtacctgcggatcctccgaccaccttcaaccagtcaaagctgaactctttcatcacgcaatacagcaccggacaggtcagcgtggaaattgaatgggagctgcagaaggaaaacagcaagcgctggaaccccgagatccagtacacctccaactactacaaatctacaagtgtggactttgctgttaatacagaaggcgtgtactctgaaccccgccccattggcacccgttacctcacccgtaatctg

SEQ ID NO: 129 - protein, 738 aa, Artificial Sequence
  source: /note="Description of Artificial Sequence: Synthetic polypeptide"
MAADGYLPDWLEDNLSEGIREWWALKPGAPKPKANQQKQDDGRGLVLPGYKYLGPFNGLDKGEPVNAADAAALEHDKAYDQQLQAGDNPYLRYNHADAEFQERLQEDTSFGGNLGRAVFQAKKRVLEPLGLVEEGAKTAPGKKRPVEPSPQRSPDSSTGIGKKGQQPARKRLNFGQTGDSESVPDPQPLGEPPAAPSGVGPNTMAAGGGAPMADNNEGADGVGSSSGNWHCDSTWLGDRVITTSTRTWALPTYNNHLYKQISNGTSGGATNDNTYFGYSTPWGYFDFNRFHCHFSPRDWQRLINNNWGFRPKRLSFKLFNIQVKEVTQNEGTKTIANNLTSTIQVFTDSEYQLPYVLGSAHQGCLPPFPADVFMIPQYGYLTLNNGSQAVGRSSFYCLEYFPSQMLRTGNNFQFTYTFEDVPFHSSYAHSQSLDRLMNPLIDQYLYYLSRTQTTGGTANTQTLGFSQGGPNTMANQAKNWLPGPCYRQQRVSTTTGQNNNSNFAWTAGTKYHLNGRNSLANPGIAMATHKDDEERFFPSNGILIFGKQNAARDNADYSDVMLTSEEEIKTTNPVATEEYGIVADNLPERTAMSLPGTVNSQGALPGMVWQNRDVYLQGPIWAKIPHTDGNFHPSPLMGGFGLKHPPPQILIKNTPVPADPPTTFNQSKLNSFITQYSTGQVSVEIEWELQKENSKRWNPEIQYTSNYYKSTSVDFAVNTEGVYSEPRPIGTRYLTRNL

SEQ ID NO: 130 - DNA, 2214 bp, Artificial Sequence
  source: /note="Description of Artificial Sequence: Synthetic polynucleotide"
atggctgccgatggttatcttccagattggctcgaggacaacctctctgagggcattcgcgagtggtgggcgctgaaacctggagccccgaagcccaaagccaaccagcaaaagcaggacgacggccggggtctggtgcttcctggctacaagtacctcggacccttcaacggactcgacaagggggagcccgtcaacgcggcggacgcagcggccctcgagcacgacaaggcctacgaccagcagctgcaggcgggtgacaatccgtacctgcggtataaccacgccgacgccgagtttcaggagcgtctgcaagaagatacgtcttttgggggcaacctcgggcgagcagtcttccaggccaagaagcgggttctcgaacctctcggtctggttgaggaaggcgctaagacggctcctggaaagaagagaccggtagagccatcaccccagcgttctccagactcctctacgggcatcggcaagaaaggccaacagcccgccagaaaaagactcaattttggtcagactggcgactcagagtcagttccagaccctcaacctctcggagaacctccagcagcgccctctggtgtgggacctaatacaatggctgcaggcggtggcgcaccaatggcagacaataacgaaggcgccgacggagtgggtagttcctcgggaaattggcattgcgattccacatggctgggcgacagagtcatcaccaccagcacccgaacctgggccctgcccacctacaacaaccacctctacaagcaaatctccaacgggacatcgggaggagccaccaacgacaacacctacttcggctacagcaccccctgggggtattttgactttaacagattccactgccacttttcaccacgtgactggcagcgactcatcaacaacaactggggattccggcccaagagactcagcttcaagctcttcaacatccaggtcaaggaggtcacgcagaatgaaggcaccaagaccatcgccaataacctcaccagcaccatccaggtgtttacggactcggagtaccagctgccgtacgttctcggctctgcccaccagggctgcctgcctccgttcccggcggacgtgttcatgattccccagtacggctacctaacactcaacaacggtagtcaggccgtgggacgctcctccttctactgcctggaatactttccttcgcagatgctgagaaccggcaacaacttccagtttacttacaccttcgaggacgtgcctttccacagcagctacgcccacagccagagcttggaccggctgatgaatcctctgattgaccagtacctgtactacttgtctcggactcaaacaacaggaggcacggcaaatacgcagactctgggcttcagccaaggtgggcctaatacaatggccaatcaggcaaagaactggctgccaggaccctgttaccgccaacaacgcgtctcaacgacaaccgggcaaaacaacaatagcaactttgcctggactgctgggaccaaataccatctgaatggaagaaattcattggctaatcctggcatcgctatggcaacacacaaagacgacgaggagcgtttttttcccagtaacgggatcctgatttttggcaaacaaaatgctgccagagacaatgcggattacagcgatgtcatgctcaccagcgaggaagaaatcaaaaccactaaccctgtggctacagaggaatacggtatcgtggcagataacttgagttttagtcgtgcggttctttgtgatggaactgtcaacagccagggggccttacccggtatggtctggcagaaccgggacgtgtacctgcagggtcccatctgggccaagattcctcacacggacggcaacttccacccgtctccgctgatgggcggctttggcctgaaacatcctccgcctcagatcctgatcaagaacacgcctgtacctgcggatcctccgaccaccttcaaccagtcaaagctgaactctttcatcacgcaatacagcaccggacaggtcagcgtggaaattgaatgggagctgcagaaggaaaacagcaagcgctggaaccccgagatccagtacacctccaactactacaaatctacaagtgtggactttgctgttaatacagaaggcgtgtactctgaaccccgccccattggcacccgttacctcacccgtaatctg

SEQ ID NO: 131 - protein, 738 aa, Artificial Sequence
  source: /note="Description of Artificial Sequence: Synthetic polypeptide"
MAADGYLPDWLEDNLSEGIREWWALKPGAPKPKANQQKQDDGRGLVLPGYKYLGPFNGLDKGEPVNAADAAALEHDKAYDQQLQAGDNPYLRYNHADAEFQERLQEDTSFGGNLGRAVFQAKKRVLEPLGLVEEGAKTAPGKKRPVEPSPQRSPDSSTGIGKKGQQPARKRLNFGQTGDSESVPDPQPLGEPPAAPSGVGPNTMAAGGGAPMADNNEGADGVGSSSGNWHCDSTWLGDRVITTSTRTWALPTYNNHLYKQISNGTSGGATNDNTYFGYSTPWGYFDFNRFHCHFSPRDWQRLINNNWGFRPKRLSFKLFNIQVKEVTQNEGTKTIANNLTSTIQVFTDSEYQLPYVLGSAHQGCLPPFPADVFMIPQYGYLTLNNGSQAVGRSSFYCLEYFPSQMLRTGNNFQFTYTFEDVPFHSSYAHSQSLDRLMNPLIDQYLYYLSRTQTTGGTANTQTLGFSQGGPNTMANQAKNWLPGPCYRQQRVSTTTGQNNNSNFAWTAGTKYHLNGRNSLANPGIAMATHKDDEERFFPSNGILIFGKQNAARDNADYSDVMLTSEEEIKTTNPVATEEYGIVADNLSFSRAVLCDGTVNSQGALPGMVWQNRDVYLQGPIWAKIPHTDGNFHPSPLMGGFGLKHPPPQILIKNTPVPADPPTTFNQSKLNSFITQYSTGQVSVEIEWELQKENSKRWNPEIQYTSNYYKSTSVDFAVNTEGVYSEPRPIGTRYLTRNL

SEQ ID NO: 132 - DNA, 4385 bp, Adeno-associated virus 9
cagagagggagtggccaactccatcactaggggtaatcgcgaagcgcctcccacgctgccgcgtcagcgctgacgtagattacgtcataggggagtggtcctgtattagctgtcacgtgagtgcttttgcgacattttgcgacaccacatggccatttgaggtatatatggccgagtgagcgagcaggatctccattttgaccgcgaaatttgaacgagcagcagccatgccgggcttctacgagattgtgatcaaggtgccgagcgacctggacgagcacctgccgggcatttctgactcttttgtgaactgggtggccgagaaggaatgggagctgcccccggattctgacatggatcggaatctgatcgagcaggcacccctgaccgtggccgagaagctgcagcgcgacttcctggtccaatggcgccgcgtgagtaaggccccggaggccctcttctttgttcagttcgagaagggcgagagctactttcacctgcacgttctggtcgagaccacgggggtcaagtccatggtgctaggccgcttcctgagtcagattcgggagaagctggtccagaccatctaccgcgggatcgagccgaccctgcccaactggttcgcggtgaccaagacgcgtaatggcgccggcggggggaacaaggtggtggacgagtgctacatccccaactacctcctgcccaagactcagcccgagctgcagtgggcgtggactaacatggaggagtatataagcgcgtgcttgaacctggccgagcgcaaacggctcgtggcgcagcacctgacccacgtcagccagacgcaggagcagaacaaggagaatctgaaccccaattctgacgcgcccgtgatcaggtcaaaaacctccgcgcgctacatggagctggtcgggtggctggtggaccggggcatcacctccgagaagcagtggatccaggaggaccaggcctcgtacatctccttcaacgccgcctccaactcgcggtcccagatcaaggccgcgctggacaatgccggcaagatcatggcgctgaccaaatccgcgcccgactacctggtaggcccttcacttccggtggacattacgcagaaccgcatctaccgcatcctgcagctcaacggctacgaccctgcctacgccggctccgtctttctcggctgggcacaaaagaagttcgggaaacgcaacaccatctggctgtttgggccggccaccacgggaaagaccaacatcgcagaagccattgcccacgccgtgcccttctacggctgcgtcaactggaccaatgagaactttcccttcaacgattgcgtcgacaagatggtgatctggtgggaggagggcaagatgacggccaaggtcgtggagtccgccaaggccattctcggcggcagcaaggtgcgcgtggaccaaaagtgcaagtcgtccgcccagatcgaccccactcccgtgatcgtcacctccaacaccaacatgtgcgccgtgattgacgggaacagcaccaccttcgagcaccagcagcctctccaggaccggatgtttaagttcgaactcacccgccgtctggagcacgactttggcaaggtgacaaagcaggaagtcaaagagttcttccgctgggccagtgatcacgtgaccgaggtggcgcatgagttttacgtcagaaagggcggagccagcaaaagacccgcccccgatgacgcggataaaagcgagcccaagcgggcctgcccctcagtcgcggatccatcgacgtcagacgcggaaggagctccggtggactttgccgacaggtaccaaaacaaatgttctcgtcacgcgggcatgcttcagatgctgcttccctgcaaaacgtgcgagagaatgaatcagaatttcaacatttgcttcacacacggggtcagagactgctcagagtgtttccccggcgtgtcagaatctcaaccggtcgtcagaaagaggacgtatcggaaactctgtgcgattcatcatctgctggggcgggctcccgagattgcttgctcggcctgcgatctggtcaacgtggacctggatgactgtgtttctgagcaataaatgacttaaaccaggtatggctgccgatggttatcttccagattggctcgaggacaacctctctgagggcattcgcgagtggtgggcgctgaaacctggagccccgaagcccaaagccaaccagcaaaagcaggacgacggccggggtctggtgcttcctggctacaagtacctcggacccttcaacggactcgacaagggggagcccgtcaacgcggcggacgcagcggccctcgagcacggcaaggcctacgaccagcagctgcaggcgggtgacaatccgtacctgcggtataaccacgccgacgccgagtttcaggagcgtctgcaagaagatacgtcttttgggggcaacctcgggcgagcagtcttccaggccaagaagcgggttctcgaacctctcggtctggttgaggaaggcgctaagacggctcctggaaagaagagaccggtagagccatcaccccagcgttctccagactcctctacgggcatcggcaagaaaggccaacagcccgccagaaaaagactcaattttggtcagactggcgactcagagtcagttccagaccctcaacctctcggagaacctccagcagcgccctctggtgtgggacctaatacaatggctgcaggcggtggcgcaccaatggcagacaataacgaaggcgccgacggagtgggtaattcctcgggaaattggcattgcgattccacatggctgggggacagagtcatcaccaccagcacccgaacctgggcattgcccacctacaacaaccacctctacaagcaaatctccaatggaacatcgggaggaagcaccaacgacaacacctactttggctacagcaccccctgggggtattttgacttcaacagattccactgccacttctcaccacgtgactggcagcgactcatcaacaacaactggggattccggccaaagagactcaacttcaagctgttcaacatccaggtcaaggaggttacgacgaacgaaggcaccaagaccatcgccaataaccttaccagcaccgtccaggtctttacggactcggagtaccagctaccgtacgtcctaggctctgcccaccaaggatgcctgccaccgtttcctgcagacgtcttcatggttcctcagtacggctacctgacgctcaacaatggaagtcaagcgttaggacgttcttctttctactgtctggaatacttcccttctcagatgctgagaaccggcaacaactttcagttcagctacactttcgaggacgtgcctttccacagcagctacgcacacagccagagtctagatcgactgatgaaccccctcatcgaccagtacctatactacctggtcagaacacagacaactggaactgggggaactcaaactttggcattcagccaagcaggccctagctcaatggccaatcaggctagaaactgggtacccgggccttgctaccgtcagcagcgcgtctccacaaccaccaaccaaaataacaacagcaactttgcgtggacgggagctgctaaattcaagctgaacgggagagactcgctaatgaatcctggcgtggctatggcatcgcacaaagacgacgaggaccgcttctttccatcaagtggcgttctcatatttggcaagcaaggagccgggaacgatggagtcgactacagccaggtgctgattacagatgaggaagaaattaaagccaccaaccctgtagccacagaggaatacggagcagtggccatcaacaaccaggccgctaacacgcaggcgcaaactggacttgtgcataaccagggagttattcctggtatggtctggcagaaccgggacgtgtacctgcagggccctatttgggctaaaatacctcacacagatggcaactttcacccgtctcctctgatgggtggatttggactgaaacacccacctccacagattctaattaaaaatacaccagtgccggcagatcctcctcttaccttcaatcaagccaagctgaactctttcatcacgcagtacagcacgggacaagtcagcgtggaaatcgagtgggagctgcagaaagaaaacagcaagcgctggaatccagagatccagtatacttcaaactactacaaatctacaaatgtggactttgctgtcaataccaaaggtgtttactctgagcctcgccccattggtactcgttacctcacccgtaatttgtaattgcctgttaatcaataaaccggttaattcgtttcagttgaactttggtctctgcg

SEQ ID NO: 133 - DNA, 4382 bp, Adeno-associated virus 9
cagagagggagtggccaactccatcactaggggtaatcgcgaagcgcctcccacgctgccgcgtcagcgctgacgtagattacgtcataggggagtggtcctgtattagctgtcacgtgagtgcttttgcgacattttgcgacaccacatggccatttgaggtatatatggccgagtgagcgagcaggatctccattttgaccgcgaaatttgaacgagcagcagccatgccgggcttctacgagattgtgatcaaggtgccgagcgacctggacgagcacctgccgggcatttctgactcttttgtgaactgggtggccgagaaggaatgggagctgcccccggattctgacatggatcggaatctgatcgagcaggcacccctgaccgtggccgagaagctgtagcgcgacttcctggtccaatggcgccgcgtgagtaaggccccggaggccctcttctttgttcagttcgagaagggcgagagctactttcacctgcacgttctggtcgagaccacgggggtcaagtccatggtgctaggccgcttcctgagtcagattcgggagaagctggtccagaccatctaccgcgggatcgagccgaccctgcccaactggttcgcggtgaccaagacgcgtaatggcgccggcggggggaacaaggtggtggacgagtgctacatccccaactacctcctgcccaagactcagcccgagctgcagtgggcgtggactaacatggaggagtatataagcgcgtgcttgaacctggccgagcgcaaacggctcgtggcgcagcacctgacccacgtcagccagacgcaggagcagaacaaggagaatctgaaccccaattctgacgcgcccgtgatcaggtcaaaaacctccgcgcgctacatggagctggtcgggtggctggtggaccggggcatcacctccgagaagcagtggatccaggaggaccaggcctcgtacatctccttcaacgccgcctccaactcgcggtcccagatcaaggccgcgctggacaatgccggcaagatcatggcgctgaccaaatccgcgcccgactacctggtaggcccttcacttccggtggacattacgcagaaccgcatctaccgcatcctgcagctcaacggctacgaccctgcctacgccggctccgtctttctcggctgggcacaaaagaagttcgggaaacgcaacaccatctggctgtttgggccggccaccacgggaaagaccaacatcgcagaagccattgcccacgccgtgcccttctacggctgcgtcaactggaccaatgagaactttcccttcaacgattgcgtcgacaagatggtgatctggtgggaggagggcaagatgacggccaaggtcgtggagtccgccaaggccattctcggcggcagcaaggtgcgcgtggaccaaaagtgcaagtcgtccgcccagatcgaccccactcccgtgatcgtcacctccaacaccaacatgtgcgccgtgattgacgggaacagcaccaccttcgagcaccagcagcctctccaggaccggatgtttaagttcgaactcacccgccgtctggagcacgactttggcaaggtgacaaagcaggaagtcaaagagttcttccgctgggccagtgatcacgtgaccgaggtggcgcatgagttttacgtcagaaagggcggagccagcaaaagacccgcccccgatgacgcggataaaagcgagcccaagcgggcctgcccctcagtcgcggatccatcgacgtcagacgcggaaggagctccggtggactttgccgacaggtaccaaaacaaatgttctcgtcacgcgggcatgcttcagatgctgcttccctgcaaaacgtgcgagagaatgaatcagaatttcaacatttgcttcacacacggggtcagagactgctcagagtgtttccccggcgtgtcagaatctcaaccggtcgtcagaaagaggacgtatcggaaactctgtgcgattcatcatctgctggggcgggctcccgagattgcttgctcggcctgcgatctggtcaacgtggacctggatgactgtgtttctgagcaataaatgacttaaaccaggtatggctgccgatggttatcttccagattggctcgaggacaacctctctgagggcattcgcgagtggtgggacctgaaacctggagccccgaaacccaaagccaaccagcaaaagcaggacgacggccggggtctggtgcttcctggctacaagtacctcggacccttcaacggactcgacaagggggagcccgtcaacgcggcggacgcagcggccctcgagcacgacaaggcctacgaccagcagctcaaagcgggtgacaatccgtacctgcggtataaccacgccgacgccgagtttcaggagcgtctgcaagaagatacgtcttttgggggcaacctcgggcgagcagtcttccaggccaagaagcgggttctcgaacctctcggtctggttgaggaaggcgctaagacggctcctggaaagaagagaccggtagagcagtcaccccaagaaccagactcatcctcgggcatcggcaaatcaggccagcagcccgctaaaaagagactcaattttggtcagactggcgactcagagtcagtccccgacccacaacctctcggagaacctccagaagccccctcaggtctgggacctaatacaatggcttcaggcggtggcgctccaatggcagacaataacgaaggcgccgacggagtgggtaattcctcgggaaattggcattgcgattccacatggctgggggacagagtcatcaccaccagcacccgaacctgggcattgcccacctacaacaaccacctctacaagcaaatctccaatggaacatcgggaggaagcaccaacgacaacacctactttggctacagcaccccctgggggtattttgacttcaacagattccactgccacttctcaccacgtgactggcagcgactcatcaacaacaactggggattccggccaaagagactcaacttcaagctgttcaacatccaggtcaaggaggttacgacgaacgaaggcaccaagaccatcgccaataaccttaccagcaccgtccaggtctttacggactcggagtaccagctaccgtacgtcctaggctctgcccaccaaggatgcctgccaccgtttcctgcagacgtcttcatggttcctcagtacggctacctgacgctcaacaatggaagtcaagcgttaggacgttcttctttctactgtctggaatacttcccttctcagatgctgagaaccggcaacaactttcagttcagctacactttcgaggacgtgcctttccacagcagctacgcacacagccagagtctagatcgactgatgaaccccctcatcgaccagtacctatactacctggtcagaacacagacaactggaactgggggaactcaaactttggcattcagccaagcaggccctagctcaatggccaatcaggctagaaactgggtacccgggccttgctaccgtcagcagcgcgtctccacaaccaccaaccaaaataacaacagcaactttgcgtggacgggagctgctaaattcaagctgaacgggagagactcgctaatgaatcctggcgtggctatggcatcgcacaaagacgacgaggaccgcttctttccatcaagtggcgttctcatatttggcaagcaaggagccgggaacgatggagtcgactacagccaggtgctgattacagatgaggaagaaattaaagccaccaaccctgtagccacagaggaatacggagcagtggccatcaacaaccaggccgctaacacgcaggcgcaaactggacttgtgcataaccagggagttattcctggtatggtctggcagaaccgggacgtgtacctgcagggccctatttgggctaaaatacctcacacagatggcaactttcacccgtctcctctgatgggtggatttggactgaaacacccacctccacagattctaattaaaaatacaccagtgccggcagatcctcctcttaccttcaatcaagccaagctgaactctttcatcacgcagtacagcacgggacaagtcagcgtggaaatcgagtgggagctgcagaaagaaaacagcaagcgctggaatccagagatccagtatacttcaaactactacaaatctacaaatgtggactttgctgtcaataccgaaggtgtttactctgagcctcgccccattggtactcgttacctcacccgtaatttgtaattgcctgttaatcaataaaccggttaattcgtttcagttgaactttggtctctgcg

SEQ ID NO: 134 - protein, 736 aa, Adeno-associated virus 9
MAADGYLPDWLEDNLSEGIREWWALKPGAPQPKANQQHQDNARGLVLPGYKYLGPGNGLDKGEPVNAADAAALEHDKAYDQQLKAGDNPYLKYNHADAEFQERLKEDTSFGGNLGRAVFQAKKRLLEPLGLVEEAAKTAPGKKRPVEQSPQEPDSSAGIGKSGAQPAKKRLNFGQTGDTESVPDPQPIGEPPAAPSGVGSLTMASGGGAPVADNNEGADGVGSSSGNWHCDSQWLGDRVITTSTRTWALPTYNNHLYKQISNSTSGGSSNDNAYFGYSTPWGYFDFNRFHCHFSPRDWQRLINNNWGFRPKRLNFKLFNIQVKEVTDNNGVKTIANNLTSTVQVFTDSDYQLPYVLGSAHEGCLPPFPADVFMIPQYGYLTLNDGSQAVGRSSFYCLEYFPSQMLRTGNNFQFSYEFENVPFHSSYAHSQSLDRLMNPLIDQYLYYLSKTINGSGQNQQTLKFSVAGPSNMAVQGRNYIPGPSYRQQRVSTTVTQNNNSEFAWPGASSWALNGRNSLMNPGPAMASHKEGEDRFFPLSGSLIFGKQGTGRDNVDADKVMITNEEEIKTTNPVATESYGQVATNHQSAQAQAQTGWVQNQGILPGMVWQDRDVYLQGPIWAKIPHTDGNFHPSPLMGGFGMKHPPPQILIKNTPVPADPPTAFNKDKLNSFITQYSTGQVSVEIEWELQKENSKRWNPEIQYTSNYYKSNNVEFAVNTEGVYSEPRPIGTRYLTRNL

SEQ ID NO: 135 - protein, 736 aa, Adeno-associated virus 9
MAADGYLPDWLEDNLSEGIREWWDLKPGAPKPKANQQKQDDGRGLVLPGYKYLGPFNGLDKGEPVNAADAAALEHDKAYDQQLKAGDNPYLRYNHADAEFQERLQEDTSFGGNLGRAVFQAKKRVLEPLGLVEEGAKTAPGKKRPVEQSPQEPDSSSGIGKSGQQPAKKRLNFGQTGDSESVPDPQPLGEPPEAPSGLGPNTMASGGGAPMADNNEGADGVGNSSGNWHCDSTWLGDRVITTSTRTWALPTYNNHLYKQISNGTSGGSTNDNTYFGYSTPWGYFDFNRFHCHFSPRDWQRLINNNWGFRPKRLNFKLFNIQVKEVTTNEGTKTIANNLTSTVQVFTDSEYQLPYVLGSAHQGCLPPFPADVFMVPQYGYLTLNNGSQALGRSSFYCLEYFPSQMLRTGNNFQFSYTFEDVPFHSSYAHSQSLDRLMNPLIDQYLYYLVRTQTTGTGGTQTLAFSQAGPSSMANQARNWVPGPCYRQQRVSTTTNQNNNSNFAWTGAAKFKLNGRDSLMNPGVAMASHKDDEDRFFPSSGVLIFGKQGAGNDGVDYSQVLITDEEEIKATNPVATEEYGAVAINNQAANTQAQTGLVHNQGVIPGMVWQNRDVYLQGPIWAKIPHTDGNFHPSPLMGGFGLKHPPPQILIKNTPVPADPPLTFNQAKLNSFITQYSTGQVSVEIEWELQKENSKRWNPEIQYTSNYYKSTNVDFAVNTEGVYSEPRPIGTRYLTRNL

SEQ ID NO: 136 - protein, 623 aa, Adeno-associated virus 9
MPGFYEIVIKVPSDLDEHLPGISDSFVNWVAEKEWELPPDSDMDRNLIEQAPLTVAEKLQRDFLVQWRRVSKAPEALFFVQFEKGESYFHLHVLVETTGVKSMVLGRFLSQIREKLVQTIYRGIEPTLPNWFAVTKTRNGAGGGNKVVDECYIPNYLLPKTQPELQWAWTNMEEYISACLNLAERKRLVAQHLTHVSQTQEQNKENLNPNSDAPVIRSKTSARYMELVGWLVDRGITSEKQWIQEDQASYISFNAASNSRSQIKAALDNAGKIMALTKSAPDYLVGPSLPVDITQNRIYRILQLNGYDPAYAGSVFLGWAQKKFGKRNTIWLFGPATTGKTNIAEAIAHAVPFYGCVNWTNENFPFNDCVDKMVIWWEEGKMTAKVVESAKAILGGSKVRVDQKCKSSAQIDPTPVIVTSNTNMCAVIDGNSTTFEHQQPLQDRMFKFELTRRLEHDFGKVTKQEVKEFFRWASDHVTEVAHEFYVRKGGASKRPAPDDADKSEPKRACPSVADPSTSDAEGAPVDFADRYQNKCSRHAGMLQMLLPCKTCERMNQNFNICFTHGVRDCSECFPGVSESQPVVRKRTYRKLCAIHHLLGRAPEIACSACDLVNVDLDDCVSEQ

SEQ ID NO: 137 - DNA, 2211 bp, Artificial Sequence
  source: /note="Description of Artificial Sequence: Synthetic polynucleotide"
atggctgccgatggttatcttccagattggctcgaggacaaccttagtgaaggaattcgcgagtggtgggctttgaaacctggagcccctcaacccaaggcaaatcaacaacatcaagacaacgctcgaggtcttgtgcttccgggttacaaataccttggacccggcaacggactcgacaagggggagccggtcaacgcagcagacgcggcggccctcgagcacgacaaggcctacgaccagcagctcaaggccggagacaacccgtacctcaagtacaaccacgccgacgccgagttccaggagcggctcaaagaagatacgtcttttgggggcaacctcgggcgagcagtcttccaggccaaaaagaggcttcttgaacctcttggtctggttgaggaagcggctaagacggctcctggaaagaagaggcctgtagagcagtctcctcaggaaccggactcctccgcgggtattggcaaatcgggtgcacagcccgctaaaaagagactcaatttcggtcagactggcgacacagagtcagtcccagaccctcaaccaatcggagaacctcccgcagccccctcaggtgtgggatctcttacaatggcttcaggtggtggcgcaccagtggcagacaataacgaaggtgccgatggagtgggtagttcctcgggaaattggcattgcgattcccaatggctgggggacagagtcatcaccaccagcacccgaacctgggccctgcccacctacaacaatcacctctacaagcaaatctccaacagcacatctggaggatcttcaaatgacaacgcctacttcggctacagcaccccctgggggtattttgacttcaacagattccactgccacttctcaccacgtgactggcagcgactcatcaacaacaactggggattccggcctaagcgactcaacttcaagctcttcaacattcaggtcaaagaggttacggacaacaatggagtcaagaccatcgccaataaccttaccagcacggtccaggtcttcacggactcagactatcagctcccgtacgtgctcgggtcggctcacgagggctgcctcccgccgttcccagcggacgttttcatgattcctcagtacgggtatctgacgcttaatgatggaagccaggccgtgggtcgttcgtccttttactgcctggaatatttcccgtcgcaaatgctaagaacgggtaacaacttccagttcagctacgagtttgagaacgtacctttccatagcagctacgctcacagccaaagcctggaccgactaatgaatccactcatcgaccaatacttgtactatctctcaaagactattaacggttctggacagaatcaacaaacgctaaaattcagtgtggccggacccagcaacatggctgtccagggaagaaactacatacctggacccagctaccgacaacaacgtgtctcaaccactgtgactcaaaacaacaacagcgaatttgcttggcctggagcttcttcttgggctctcaatggacgtaatagcttgatgaatcctggacctgctatggccagccacaaagaaggagaggaccgtttctttcctttgtctggatctttaatttttggcaaacaaggaactggaagagacaacgtggatgcggacaaagtcatgataaccaacgaagaagaaattaaaactactaacccggtagcaacggagtcctatggacaagtggccacaaaccaccagagtgcccaagcacaggcgcagaccggctgggttcaaaaccaaggaatacttccgggtatggtttggcaggacagagatgtgtacctgcaaggacccatttgggccaaaattcctcacacggacggcaactttcacccttctccgctgatgggagggtttggaatgaagcacccgcctcctcagatcctcatcaaaaacacacctgtacctgcggatcctccaacggccttcaacaaggacaagctgaactctttcatcacccagtattctactggccaagtcagcgtggagatcgagtgggagctgcagaaggaaaacagcaagcgctggaacccggagatccagtacacttccaactattacaagtctaataatgttgaatttgctgttaatactgaaggtgtatatagtgaaccccgccccattggcaccagatacctgactcgtaatctgtaa

SEQ ID NO: 138 - protein, 736 aa, Artificial Sequence; identical to SEQ ID NO: 134
  source: /note="Description of Artificial Sequence: Synthetic polypeptide"

SEQ ID NO: 139 - DNA, 2460 bp, Artificial Sequence
  source: /note="Description of Artificial Sequence: Synthetic polynucleotide"
ggtaattcctccggaaattggcattgcgattccacatggctgggcgaccgagtcattaccaccagcacccggacttgggccctgcccacctacaacaaccacctctacaagcaaatctccagccaatcgggtgccaccaacgacaaccactacttcggctacagcaccccttgggggtattttgatttcaacagattccactgccatttctcaccacgtgactggcagcgactcatcaacaacaactggggattcatggctgccgatggttatcttccagattggctcgaggacactctctctgaaggaatcagacagtggtggaagctcaaacctggcccaccaccgccgaaacctaaccaacaacaccgggacgacagtaggggtcttgtgcttcctgggtacaagtacctcggacccttcaacggactcgacaaaggagagccggtcaacgaggcagacgccgcggccctcgagcacgacaaagcctacgaccaccagctcaagcaaggggacaacccgtacctcaaatacaaccacgcggacgctgaatttcaggagcgtcttcaagaagatacgtctttcgggggcaacctcgggcgagcagtcttccaggccaaaaagagggtactcgagcctcttggtctggttgaggaagctgttaagacggctcctggaaaaaagagacctatagagcagtctcctgcagaaccggactcttcctcgggcatcggcaaatcaggccagcagcccgctaagaaaagactcaattttggtcagactggcgacacagagtcagtcccagaccctcaaccaatcggagaaccccccgcagccccctctggtgtgggatctaatacaatggcttcaggcggtggggcaccaatggcagacaataacgaaggcgccgacggagtgggtaattcctcgggaaattggcattgcgattccacatggatgggcgacagagttatcaccaccagcacaagaacctgggccctccccacctacaataatcacctctacaagcaaatctccagcgaatcgggagccaccaacgacaaccactacttcggctacagcaccccctgggggtattttgactttaacagattccactgtcacttctcaccacgtgactggcagcgactcatcaacaacaactggggatttagacccaagaaactcaatttcaagctcttcaacatccaagtcaaggaggtcacgcagaatgatggaaccacgaccatcgccaataaccttaccagcacggtgcaggtcttcacagactctgagtaccagctgccctacgtcctcggttcggctcaccagggctgccttccgccgttcccagcagacgtcttcatgattcctcagtacggctacttgactctgaacaatggcagccaagcggtaggacgttcttcattctactgtctagagtattttccctctcagatgctgaggacgggaaacaacttcaccttcagctacacttttgaagacgtgcctttccacagcagctacgcgcacagccagagtctggatcggctgatgaatcctctcattgaccagtacctgtattacctgagcaaaactcagggtacaagtggaacaacgcagcaatcgagactgcagttcagccaagctgggcctagctccatggctcagcaggccaaaaactggctaccgggacccagctaccgacagcagcgaatgtctaagacggctaatgacaacaacaacagtgaatttgcttggactgcagccaccaaatattacctgaatggaagaaattctctggtcaatcccgggcccccaatggccagtcacaaggacgatgaggaaaagtatttccccatgcacggaaatctcatctttggaaaacaaggcacaggaactaccaatgtggacattgaatcagtgcttattacagacgaagaagaaatcagaacaactaatcctgtggctacagaacaatacggacaggttgccaccaaccatcagagtcagaacaccacagcttcctatggaagtgtggacagccagggaatcttacctggaatggtgtggcaggaccgcgatgtctatcttcaaggtcccatttgggccaaaactcctcacacggacggacactttcatccttctccgctcatgggaggctttggactgaaacaccctcctccccagatcctgatcaaaaacacacctgtgccagcgaatcccgcgaccactttcactcctggaaagtttgcttcgttcattacccagtattccaccggacaggtcagcgtggaaatagagtgggagctgcagaaagaaaacagcaaacgctggaacccagaaattcagtacacctccaactacaacaagtcggtgaatgtggagtttaccgtggacgcaaacggtgtttattctgaaccccgccctattggcactcgttaccttacccggaacttg

SEQ ID NO: 140 - DNA, 3123 bp, Artificial Sequence
  source: /note="Description of Artificial Sequence: Synthetic polynucleotide"
gaattcgccctttctacggctgcgtcaactggaccaatgaaaactttcccttcaacgattgcgtcgacaagatggtgatctggtgggaggagggaaagatgaccgccaaggtcgtggaatctgccaaagccattctgggtggaggcaaggttcgtgtggaccagaaatgcaagtcttcggcccagatcgacccgactccggtgattgtcacctctaacaccaacatgtgcgccgtgattgacggaaactcgaccaccttcgagcaccagcagccgttgcaagaccggatgttcaaatttgaacttacccgccgtttggatcatgactttgggaaggtcaccaagcaggaagtcaaagactttttccggtgggctcaagatcacgtgactgaggtggagcatgagttctacgtcaaaaagggtggagccaagaaaaggcccgcccccgatgatgtatatataaatgagcccaagcgggcgcgcgagtcagttgcgcagccatcgacgtcagacgcggaagcttcgataaactacgcggacaggtaccaaaacaaatgttctcgtcacgtgggcatgaatctgatgctgtttccctgtcgacaatgcgaaagaatgaatcagaattcaaatatctgcttcacacacgggcaaaaagactgtttggaatgctttcccgtgtcagaatctcaacccgtttctgtcgtcagaaaaacgtatcagaaactttgttacattcatcatatcatgggaaaagtaccagacgcctgcactgcctgcgacctggtaaatgtggacttggatgactgtatttctgagcaataaatgacttaaatcaggtatggctgctgacggttatcttccagattggctcgaggacactctctctgaaggaatcagacagtggtggaagctcaaacctggcccaccaccgccgaaacctaaccaacaacaccgggacgacagtaggggtcttgtgcttcctgggtacaagtacctcggacccttcaacggactcgacaaaggagagccggtcaacgaggcagacgccgcggccctcgagcacgacaaagcctacgaccaccagctcaagcaaggggacaacccgtacctcaaatacaaccacgcggacgctgaatttcaggagcgtcttcaagaagatacgtctttcgggggcaacctcgggcgagcagtcttccaggccaaaaagagggtactcgagcctcttggtctggttgaggaagctgttaagacggctcctggaaaaaagagacctatagagcagtctcctgcagaaccggactcttcctcgggcatcggcaaatcaggccagcagcccgctaagaaaagactcaattttggtcagactggcgacacagagtcagtcccaggccctcaaccaatcggagaaccccccgcagccccctctggtgtgggatctaatacaatggcttcaggcggtggggcaccaatggcagacaataacgaaggcgccgacggagtgggtaattcctcgggaaattggcattgcgattccacatggatgggcgacagagttatcaccaccagcacaagaacctgggccctccccacctacaataatcacctctacaagcaaatctccagcgaatcgggagccaccaacgacaaccactacttcggctacagcaccccctgggggtattttgactttaacagattccactgtcacttctcaccacgtgactggcagcgactcatcaacaacaactggggatttagacccaagaaactcaatttcaagctcttcaacatccaagtcaaggaggtcacgcagaatgatggaaccacgaccatcgccaataaccttaccagcgcggtgcaggtcttcacagactctgagtaccagctgccctacgtcctcggttcggctcaccagggctgccttccgccgttcccagcagacgtcttcatgattcctcagtacggctacttgactctgaacaatggcagccaagcggtaggacgttcttcattctactgtctagagtattttccctctcagatgctgaggacgggaaacaacttcaccttcagctacacttttgaagacgtgcctttccacagcagctacgcgcacagccagagtctggatcggctgatgaatcctctcattgaccagtacctgtattacctgagcaaaactcagggtacaagtggaacaacgcagcaatcgagactgcagttcagccaagctgggcctagctccatggctcagcaggccaaaaactggctaccgggacccagctaccgacagcagcgaatgtctaagacggctaatgacaacaacaacagtgaatttgcttggactgcagccaccaaatattacctgaatggaagaaattctctggtcaatcccgggcccccagtggccagtcacaaggacgatgaggaaaagtatttccccatgcacggaaatctcatctttggaaaacaaggcacaggaactaccaatgtggacattgaatcagtgcttattacagacgaagaagaaatcagaacaactaatcctgtggctacagaacaatacggacaggttgccaccaaccatcagagtcagaacaccacagcttcctatggaagtgtggacagccagggaatcttacctggaatggtgtggcaggaccgcgatgtctatcttcaaggtcccatttgggccaaaactcctcacacggacggacactttcatccttctccgctcatgggaggctttggactgaaacaccctcctccccagatcctgatcaaaaacacacctgtgccagcgaatcccgcgaccactttcactcctggaaagtttgcttcgttcattacccagtattccacctgacaggtcagcgtggaaatagagtgggagctgcagaaagaaaacagcaaacgctggaacccagaaattcagtacacctccaactacaacaagtcggtgaatgtggagtttaccgtggacgcaaacggtgtttattctgaaccccgccctattggcactcgttaccttacccggaacttgtaatttcctgttaatgaataagccgatttatgcgtttcagttgaactttggtctctgcgaagggcgaattcgtttaaacct

SEQ ID NO: 141 - protein, 735 aa, Artificial Sequence
  source: /note="Description of Artificial Sequence: Synthetic polypeptide"
MAADGYLPDWLEDTLSEGIRQWWKLKPGPPPPKPNQQHRDDSRGLVLPGYKYLGPFNGLDKGEPVNEADAAALEHDKAYDHQLKQGDNPYLKYNHADAEFQERLQEDTSFGGNLGRAVFQAKKRVLEPLGLVEEAVKTAPGKKRPIEQSPAEPDSSSGIGKSGQQPAKKRLNFGQTGDTESVPGPQPIGEPPAAPSGVGSNTMASGGGAPMADNNEGADGVGNSSGNWHCDSTWMGDRVITTSTRTWALPTYNNHLYKQISSESGATNDNHYFGYSTPWGYFDFNRFHCHFSPRDWQRLINNNWGFRPKKLNFKLFNIQVKEVTQNDGTTTIANNLTSAVQVFTDSEYQLPYVLGSAHQGCLPPFPADVFMIPQYGYLTLNNGSQAVGRSSFYCLEYFPSQMLRTGNNFTFSYTFEDVPFHSSYAHSQSLDRLMNPLIDQYLYYLSKTQGTSGTTQQSRLQFSQAGPSSMAQQAKNWLPGPSYRQQRMSKTANDNNNSEFAWTAATKYYLNGRNSLVNPGPPVASHKDDEEKYFPMHGNLIFGKQGTGTTNVDIESVLITDEEEIRTTNPVATEQYGQVATNHQSQNTTASYGSVDSQGILPGMVWQDRDVYLQGPIWAKTPHTDGHFHPSPLMGGFGLKHPPPQILIKNTPVPANPATTFTPGKFASFITQYSTGQVSVEIEWELQKENSKRWNPEIQYTSNYNKSVNVEFTVDANGVYSEPRPIGTRYLTRNL

SEQ ID NO: 142 - DNA, 3123 bp, Artificial Sequence
  source: /note="Description of Artificial Sequence: Synthetic polynucleotide"
gaattcgccctttctacggctgcgtcaactggaccaatgaaaactttcccttcaacgattgcgtcgacaagatggtgatctggtgggaggagggaaagatgaccgccaaggtcgtggaatctgccaaagccattctgggtggaagcaaggttcgtgtggaccagaaatgcaagtcttcggcccagatcgacccgactccggtgattgtcacctctaacaccaacatgtgcgccgtgattgacggaaactcgaccaccttcgagcaccagcagccgttgcaagaccggatgttcaaatttgaacttacccgccgtttggatcatgactttgggaaggtcaccaagcaggaagtcaaagactttttccggtgggctcaagatcacgtgactgaggtggagcatgagttctacgtcaaaaagggtggagccaagaaaaggcccgcccccgatgatgtatatataaatgagcccaagcgggcgcgcgagtcagttgcgcagccatcgacgtcagacgcggaagcttcgataaactacgcgggcaggtaccaaaacaaatgttctcgtcacgtgggcatgaatctgatgctgtttccctgtcgacaatgcgaaagaatgaatcagaattcaaatatctgcttcacacacgggcaaaaagactgtttggaatgctttcccgtgtcagaatctcaacccgtttctgtcgtcagaaaaacgtatcagaaactttgttacattcatcatatcatgggaaaagaaccagacgcctgcactgcctgcgacctggtaaatgtggacttggatgactgtatttctgagcaataaatgacttaaatcaggtatggctgctgacggttatcttccagattggctcgaggacactctctctgaaggaatcagacagtggtggaagctcaaacctggcccaccaccgccgaaacctaaccaacaacaccgggacgacagtaggggtcttgtgcttcctgggtacaagtacctcggacccttcaacggactcgacaaaggagagccggtcaacgaggcagacgccgcggccctcgagcacgacaaagcctacgaccaccagctcaagcaaggggacaacccgtacctcaaatacaaccacgcggacgctgaatttcaggagcgtcttcaagaagatacgtctttcgggggcaacctcgggcgagcagtcttccaggccaaaaagagggtactcgagcctcttggtctggttgaggaagctgttaagacggctcctggaaaaaagagacctatagagcagtctcctgcagaaccggactcttcctcgggcatcggcgaatcaggccagcagcccgctaagaaaagactcaattttggtcagactggcgacacagagtcagtcccagaccctcaaccaatcggagaaccccccgcagccccctctggtgtgggatctaatacaatggcttcaggcggtggggcaccaatggcagacgataacgaaggcgccgacggagtgggtaattcctcgggaaattggcattgcgattccacatggatgggcgacagagttatcaccaccagcacaagaacctgggccctccccacctacaataatcacctctacaagcaaatctccagcgaatcgggagccaccaacgacaaccactacttcggctacagcaccccctgggggtattttgactttaacagattccactgtcacttctcaccacgtgactggcagcgactcatcaacaacaactggggatttagacccaagaaactcaatttcaagctcttcaacatccaagtcaaggaggtcacgcagaatgatggaaccacgaccatcgccaataaccttaccagcacggtgcaggtcttcacagactctgagtaccagctgccctacgtcctcggttcggctcaccagggctgccttccgccgttcccagcagacgtcttcatgattcctcagtacggctacttgactctgaacaatggcagccaagcggtaggacgttcttcattctactgtctagagtattttccctctcagatgctgaggacgggaaacaacttcaccttcagctacacttttgaagacgtgcctttccacagcagctacgcgcacagccagagtctggatcggctgatgaatcctctcattgaccagtacctgtattacctgagcaaaactcagggtacaagtggaacaacgcagcaatcgagactgcagttcagccaagctgggcctagctccatggctcagcaggccaaaaactggctaccgggacccagctaccgacagcagcgaatgtctaagacggctaatgacaacaacaacagtgaatttgcttggactgcagccaccaaatattacctgaatggaagaaattctctggtcaatcccgggcccccaatggccagtcacaaggacgatgaggaaaagtatttccccatgcacggaaatctcatctttggaaaacaaggcacaggaactaccaatgtggacattgaatcagtgcttattacagacgaagaagaaatcagaacaactaatcctgtggctacagaacaatacggacaggttgccaccaaccatcagagtcaggacaccacagcttcctatggaagtgtggacagccagggaatcttacctggaatggtgtggcaggaccgcgatgtctatcttcaaggtcccatttgggccaaaactcctcacacggacggacactttcatccttctccgctcatgggaggctttggactgaaacaccctcctccccagatcctgatcaaaaacacacctgtgccagcgaatcccgcgaccactttcactcctggaaagtttgcttcgttcattacccagtattccaccggacaggtcagcgtggaaatagagtgggagctgcagaaagaaaacagcaaacgctggaacccagaaattcagtacacctccaactacaacaagtcggtgaatgtggagtttaccgtggacgcaaacggtgtttattctgaaccccgccctattggcactcgttaccttacccggaacttgtaatttcctgttaatgaataaaccgatttatgcgtttcagttgaactttggtctctgcgaagggcgaattcgcggccgcta

SEQ ID NO: 143 - protein, 735 aa, Artificial Sequence
  source: /note="Description of Artificial Sequence: Synthetic polypeptide"
MAADGYLPDWLEDTLSEGIRQWWKLKPGPPPPKPNQQHRDDSRGLVLPGYKYLGPFNGLDKGEPVNEADAAALEHDKAYDHQLKQGDNPYLKYNHADAEFQERLQEDTSFGGNLGRAVFQAKKRVLEPLGLVEEAVKTAPGKKRPIEQSPAEPDSSSGIGESGQQPAKKRLNFGQTGDTESVPDPQPIGEPPAAPSGVGSNTMASGGGAPMADDNEGADGVGNSSGNWHCDSTWMGDRVITTSTRTWALPTYNNHLYKQISSESGATNDNHYFGYSTPWGYFDFNRFHCHFSPRDWQRLINNNWGFRPKKLNFKLFNIQVKEVTQNDGTTTIANNLTSTVQVFTDSEYQLPYVLGSAHQGCLPPFPADVFMIPQYGYLTLNNGSQAVGRSSFYCLEYFPSQMLRTGNNFTFSYTFEDVPFHSSYAHSQSLDRLMNPLIDQYLYYLSKTQGTSGTTQQSRLQFSQAGPSSMAQQAKNWLPGPSYRQQRMSKTANDNNNSEFAWTAATKYYLNGRNSLVNPGPPMASHKDDEEKYFPMHGNLIFGKQGTGTTNVDIESVLITDEEEIRTTNPVATEQYGQVATNHQSQDTTASYGSVDSQGILPGMVWQDRDVYLQGPIWAKTPHTDGHFHPSPLMGGFGLKHPPPQILIKNTPVPANPATTFTPGKFASFITQYSTGQVSVEIEWELQKENSKRWNPEIQYTSNYNKSVNVEFTVDANGVYSEPRPIGTRYLTRNL

SEQ ID NO: 144 - DNA, 3113 bp, Artificial Sequence
  source: /note="Description of Artificial Sequence: Synthetic polynucleotide"
gaattcgccctttctacggctgcgtcaactggaccaatgaaaactttcccttcaacgattgcgtcgacaagatggtgatctggtgggaggagggaaagatgaccgccaaggtcgtggaatctgccaaagccattctgggtggaagcaaggttcgtgtggaccagaaatgcaagtcttcggcccagatcgacccgactccggtgattgtcacctctaacaccaacatgtgcgccgtgattgacggaaactcgaccaccttcgagcaccagcagccgttgcaagaccggatgttcaaatttgaacttacccgccgtttggatcatgactttgggaaggtcaccaagcaggaagtcaaagactttttccggtgggctcaagatcacgtgactgaggtggagcatgagttctacgtcaaaaagggtggagccaagaaaaggcccgcccccgatgatgtatatataaatgagcccaagcgggcgcgcgagtcagttgcgcagccatcgacgtcagacgcggaagcttcgataaactacgcggacaggtaccaaaacaaatgttctcgtcacgtgggcatgaatctgatgctgtttccctgtcgacaatgcgaaagaatgaatcagaattcaaatatctgcttcacacacgggcaaaaagactgtttggaatgctttcccgtgtcagaatctcaacccgttcctgtcgtcagaaaaacgtatcagaaactttgttacattcatcatatcatgggaaaagtaccagacgcctgcactgcctgcgacctggtaaatgtggacttggatgactgtatttctgagcaataaatgacttaaatcaggtatggctgctgacggttatcttccagattggctcgaggacactctctctgaaggaatcagacagtggtggaagctcaaacctggcccaccaccgccgaaacctaaccaacaacaccgggacgacagtaggggtcttgtgcttcctgggtacaagtacctcggacccttcaacggactcgacaaaggagagccggtcaacgaggcagacgccgcggccctcgagcacgacaaagcctacgaccaccagctcaagcaaggggacaacccgtacctcaaatacaaccacgcggacgctgaatttcaggagcgtcttcaagaagatacgtctttcgggggcaacctcgggcgagcagtcttccaggccaaaaagagggtactcgagcctcttggtctggttgaggaagctgttaagacggctcctggaaaaaagagacctatagagcagtctcctgcagaaccggactcttcctcgggcatcggcaaatcaggccagcagcccgctaagaaaagactcaattttggtcagactggcgacacagagtcagtcccagaccctcaaccaatcggagaaccccccgcagccccctctggtgtgggatctaatacaatggcttcaggcggtggggcaccaatggcagacaataacgaaggcgccgacggagtgggtaattcctcgggaaattggcattgcgattccacatggatgggcgacagagttatcaccaccagcacaagaacctgggccctccccacctacaataatcacctctacaagcaaatctccagcgaatcgggagccaccaacgacaaccactacttcggctacagcaccccctgggggtattttgactttaacagattccactgtcacttctcaccacgtgactggcagcgactcatcaataacaactggggatttagacccaagaaactcaatttcaagctcttcaacatccaagtcaaggaggtcacgcagaatgatggaaccacgaccatcgccaataaccttaccagcacggtgcaggtcttcacagactctgagtaccagctgccctacgtcctcggttcggctcaccagggctgccttccgccgttcccagcagacgtcttcatgattcctcagtacggctacttgactctgaacaatggcagccaagcggtaggacgttcttcattctactgtctagagtattttccctctcagatgctgaggacgggaaacaacttcaccttcagctacacttttgaagacgtgcctttccacagcagctacgcgcacagccagagtctggatcggctgatgaatcctctcattgaccagtacctgtattacctgagcaaaactcagggtacaagtggaacaacgcagcaatcgagactgcagttcaaccaagctgggcctagctccatggctcagcaggccaaaaactggctaccgggacccagctaccgacagcagcgaatgtctaagacggctaatgacaacaacaacagtgaatttgcttggactgcagccaccaaatattacccgaatggaagaaattctctggtcaatcccgggcccccaatggccagtcacaaggacgatgaggaaaagtatttccccatgcacggaaatctcatctttggaaaacaaggcacaggaactaccaatgtggacattgaatcagtgcttattacagacgaagaagaaatcagaacgactaatcctgtggctacagaacaatacggacaggttgccaccaaccgtcagagtcagaacaccacagcttcctatggaagtgtggacagccagggaatcttacctggaatggtgtggcaggaccgcgatgtctatcttcaaggtcccatttgggccaaaactcctcacacggacggacactttcatccttctccgctcatgggaggctttggactgaaacaccctcctccccagatcctgatcaaaaacacacctgtgccagcgaatcccgcgaccactttcactcctggaaagtttgcttcgttcattacccagtattccaccggacaggtcagcgtggaaatagagtgggagctgcagaaagaaaacagcaaacgctggaacccggaaattcagtacacctccaactacaacaagtcggtgaatgtggagtttaccgtggacgcaaacggtgtttattctgaaccccgccctattggcactcgttaccttacccggaacttgtaatttcctgttaatgaataaaccgatttatgcgtttcagttgaactttggtctctgcgaagggcgaattc

SEQ ID NO: 145 - protein, 735 aa, Artificial Sequence
  source: /note="Description of Artificial Sequence: Synthetic polypeptide"
MAADGYLPDWLEDTLSEGIRQWWKLKPGPPPPKPNQQHRDDSRGLVLPGYKYLGPFNGLDKGEPVNEADAAALEHDKAYDHQLKQGDNPYLKYNHADAEFQERLQEDTSFGGNLGRAVFQAKKRVLEPLGLVEEAVKTAPGKKRPIEQSPAEPDSSSGIGKSGQQPAKKRLNFGQTGDTESVPDPQPIGEPPAAPSGVGSNTMASGGGAPMADNNEGADGVGNSSGNWHCDSTWMGDRVITTSTRTWALPTYNNHLYKQISSESGATNDNHYFGYSTPWGYFDFNRFHCHFSPRDWQRLINNNWGFRPKKLNFKLFNIQVKEVTQNDGTTTIANNLTSTVQVFTDSEYQLPYVLGSAHQGCLPPFPADVFMIPQYGYLTLNNGSQAVGRSSFYCLEYFPSQMLRTGNNFTFSYTFEDVPFHSSYAHSQSLDRLMNPLIDQYLYYLSKTQGTSGTTQQSRLQFNQAGPSSMAQQAKNWLPGPSYRQQRMSKTANDNNNSEFAWTAATKYYPNGRNSLVNPGPPMASHKDDEEKYFPMHGNLIFGKQGTGTTNVDIESVLITDEEEIRTTNPVATEQYGQVATNRQSQNTTASYGSVDSQGILPGMVWQDRDVYLQGPIWAKTPHTDGHFHPSPLMGGFGLKHPPPQILIKNTPVPANPATTFTPGKFASFITQYSTGQVSVEIEWELQKENSKRWNPEIQYTSNYNKSVNVEFTVDANGVYSEPRPIGTRYLTRNL

SEQ ID NO: 146 - DNA, 3122 bp, Artificial Sequence
  source: /note="Description of Artificial Sequence: Synthetic polynucleotide"
agcggccgcgaattcgccctttctacggctgcgtcaactggaccaatgaaaactttcccttcaacgattgcgtcgacaagatggtgatctggtgggaggagggaaagatgaccgccaaggtcgtggaatctgccaaagccattctgggtggaagcaaggttcgtgtggaccagaaatgcaggtcttcggcccagatcgacccgactccggtgattgtcacctctaacaccaacatgtgcgccgtgattgacggaaactcgaccaccttcgagcaccagcagccgttgcaagaccggatgttcaaatttgaacttacccgccgtttggatcatgactttgggaaggtcaccaagcaggaagtcaaagactttttccggtgggctcaagatcacgtgactgaggtggagcatgagttctacgtcaaaaagggtggagccaagaaaaggcccgcccccgatgatgtatatataaatgagcccaagcgggcgcgcgagtcagttgcgcagccatcgacgtcagacgcggaagcttcgataaactacgcggacaggtaccaaaacaaatgttctcgtcacgtgggcatgaatctgatgctgtttccctgtcgacaatgcgaaagaatgaatcagaattcaaatatctgcttcacacacgggcaaaaagactgtttggaatgctttcccgtgtcagaatctcaacccgtttctgtcgtcagaaaaacgtatcagaaactttgttacattcatcatatcatgggaaaagtaccagacgcctgcactgcctgcgacctggtaaatgtggacttggatgactgtatttctgagcaataaatgacttaaatcaggtatggctgctgacggttatcttccagattggctcgaggacactctctctgaaggaatcagacagtggtggaagctcaaacctggcccaccaccgccgaaacctaaccaacaacaccgggacgacagtaggggtcttgtgcttcctgggtacaagtacctcggacccttcaacggactcgacaaaggagagccggtcaacgaggcagacgccgcggccctcgagcacgacaaagcctacgaccaccagctcaagcaaggggacaacccgtacctcaaatacaaccacgcggacgctgaatttcaggagcgtcttcaagaagatacgtctttcgggggcaacctcgggcgagcagtcttccaggccaaaaagagggtactcgagcctcttggtctggttgaggaagctgttaagacggctcctggaaaaaagagacctatagagcagtctcctgcagaaccggactcttcctcgggcatcggcaaatcaggccagcagcccgctaagaaaagactcaattttggtcagactggcgacacagagtcagtcccagaccctcaaccaatcggagaaccccccgcagccccctctggtgtgggatctaatacaatggcttcaggcggtggggcaccaatggcagacaataacgaaggcgccgacggagtgggtaattcctcgggaaattggcattgcgattccacatggatgggcgacagagttatcaccaccagcacaagaacctgggccctccccacctacaataatcgcctctacaagcaaatctccagcgaatcgggagccaccaacgacaaccactacttcggctacagcaccccctgggggtattttgactttaacagattccactgtcacttctcaccacgtgactggcagcgactcatcaacaacaactggggatttagacccaagaaactcaatttcaagctcttcaacatccaagtcaaggaggtcacgcagaatgatggaaccacgaccatcgccaataaccttaccagcacggtgcaggtcttcacagactctgagtaccagctgccctacgtcctcggttcggctcaccagggctgccttccgccgttcccagcagacgtcttcatgattcctcagtacggctacttgactctgaacaatggcagccaagcggtaggacgttcttcattctactgtctagagtattttccctctcagatgctgaggacgggaaacaacttcaccttcagctacacttttgaagacgtgcctttccacagcagctacgcgcacagccagagtctggatcggctgatgaatcctctcattgaccagtacctgtattacctgagcaaaactcagggtacaagtggaacaacgcagcaatcgagactgcagttcagccaagctgggcctagctccatggctcagcaggccaaaaactggctaccgggacccagctaccgacagcagcgaatgtctaagacggctaatgacaacaacaacagtgaatttgcttggactgcagccaccaaatattacctgaatggaagaaattctctggtcaatcccgggcccccaatggccagtcacaaggacgatgaggaaaagtatttccccatgcacggaaatctcatctttggaaaacaaggcacaggaactaccaatgtggacattgaatcagtgcttattacagacgaagaagaaatcagaacaactaatcctgtggctacagaacaatacggacaggttgccaccaaccatcagagtcagaacaccacagcttcctatggaagtgtggacagccagggaatcttacctggaatggtgtggcaggaccgcgatgtctatcttcaaggtcccatttgggccaaaactcctcacacggacggacactttcatccttctccgctcatgggaggctttggactgaaacaccctcctccccagatcctgatcaaaaacacacctgtgccagcgaatcccgcgaccactttcactcctggaaagtttgcttcgttcattacccagtattccaccggacaggtcagcgtggaaatagagtgggagctgcagaaagaaaacagcaaacgctggaacccagaaattcagtacacctccaactacaacaagtcggtgaatgtggagtttaccgtggacgcaaacggtgtttattctgaaccccgccctattggcactcgttaccttacccggaacttgtaatttcctgttaatgaataaaccgatttatgcgtttcagttgaactttggtctctgcgaagggcgaattc

SEQ ID NO: 147 - protein, 735 aa, Artificial Sequence
  source: /note="Description of Artificial Sequence: Synthetic polypeptide"
MAADGYLPDWLEDTLSEGIRQWWKLKPGPPPPKPNQQHRDDSRGLVLPGYKYLGPFNGLDKGEPVNEADAAALEHDKAYDHQLKQGDNPYLKYNHADAEFQERLQEDTSFGGNLGRAVFQAKKRVLEPLGLVEEAVKTAPGKKRPIEQSPAEPDSSSGIGKSGQQPAKKRLNFGQTGDTESVPDPQPIGEPPAAPSGVGSNTMASGGGAPMADNNEGADGVGNSSGNWHCDSTWMGDRVITTSTRTWALPTYNNRLYKQISSESGATNDNHYFGYSTPWGYFDFNRFHCHFSPRDWQRLINNNWGFRPKKLNFKLFNIQVKEVTQNDGTTTIANNLTSTVQVFTDSEYQLPYVLGSAHQGCLPPFPADVFMIPQYGYLTLNNGSQAVGRSSFYCLEYFPSQMLRTGNNFTFSYTFEDVPFHSSYAHSQSLDRLMNPLIDQYLYYLSKTQGTSGTTQQSRLQFSQAGPSSMAQQAKNWLPGPSYRQQRMSKTANDNNNSEFAWTAATKYYLNGRNSLVNPGPPMASHKDDEEKYFPMHGNLIFGKQGTGTTNVDIESVLITDEEEIRTTNPVATEQYGQVATNHQSQNTTASYGSVDSQGILPGMVWQDRDVYLQGPIWAKTPHTDGHFHPSPLMGGFGLKHPPPQILIKNTPVPANPATTFTPGKFASFITQYSTGQVSVEIEWELQKENSKRWNPEIQYTSNYNKSVNVEFTVDANGVYSEPRPIGTRYLTRNL

SEQ ID NO: 148 - DNA, 3121 bp, Artificial Sequence
  source: /note="Description of Artificial Sequence: Synthetic polynucleotide"
gaattcgcccttcgcagagaccaaagttcaactgaaacgaatcaaccggtttattgattaacaagcaattacagattacgggtgaggtaacgggtgccgatggggcgaggctcagaataagtgccatctgtgttaacagcaaagtccacatttgtagatttgtagtagttggaagtgtattgaatctctgggttccagcgtttgctgttttctttctgcagctcccattcaatttccacgctgacctgtccggtgctgtactgcgtgatgaacgacgccagcttagcttgactgaaggtagttggaggatccgcgggaacaggtgtattcttaatcaggatctgaggaggcgggtgtttcagtccaaagccccccatcagcggcgagggatgaaagtttccgtccgtgtgaggaatcttggcccagataggaccctgcaggtacacgtcccggttctgccagaccatgccaggtaaggctccttgactgttgacggcccctacaataggagcggcgttttgctgttgcaggttatcggccaccacgccgtactgttctgtggccactgggttggtggttttaatttcttcctcactggttagcataacgctgctatagtccacgttgccttttccagctccctgtttcccaaacattaagactccgctggacggaaaaaatcgctcttcgtcgtccttgtgggttgccatagcgacaccgggatttaccagagagtctctgccattcagatgatacttggtggcaccggtccaggcaaagttgctgttgttattttgcgacagtgtcgtggagacgcgttgctgccggtagcagggcccgggtagccagtttttggcctgagccgacatgttattaggcccggcctgagaaaatagcaactgctgagttcctgcggtacctcccgtggactgagtccgagacaggtagtacaggtactggtcgatgagggggttcatcagccggtccaggctttggctgtgcgcgtagctgctgtgaaaaggcacgtcctcaaactggtagctgaactcaaagttgttgcccgttctcagcatttgagaaggaaagtactccaggcagtagaaggaggaacggcccacggcctgactgccattgttcagagtcaggtacccgtactgaggaatcatgaagacgtccgccgggaacggaggcaggcagccctggcgcgcagagccgaggacgtacgggagctggtattccgagtccgtaaagacctgaatcgtgctggtaaggttattggcgatggtcttggtgccttcattctgcgtgacctccttgacctggatgttgaagagcttgaagttgagtctcttgggccggaatccccagttgttgttgatgagtcgctgccagtcacgtggtgagaagtggcagtggaatctgttaaagtcaaaatacccccagggggtgctgtagccgaagtaggtgttgtcgttggtgcttcctcccgaagtcccgttggagatttgcttgtagaggtggttgttgtaggtggggagggcccaggttcgggtgctggtggtgatgactctgtcgcccagccatgtggaatcgcaatgccaatttcctgaggaactacccactccgtcggcgccttcgttattgtctgccattggagcgccaccgcctgcagccattgtaccagatcccagaccagaggggcctgcggggggttctccgattggttgagggtcgggcactgactctgagtcgccagtctgcccaaagttgagtctctttttcgcgggctgctggcctttcttgccgatgcccgtagtggagtctggagaacgctggggtgatggctctaccggtctcttctttccaggagccgtcttagcgccttcctcaaccagaccgagaggttcgagaacccgcttcttggcctggaagactgctcgtccgaggttgcccccaaaagacgtatcttcttgcagacgctcctgaaactcggcgtcggcgtggttataccgcaggtacggattgtcacccgctttgagctgctggtcgtaggccttgtcgtgctcgagggccgctgcgtccgccgcgttgacgggctcccccttgtcgagtccgttgaagggtccgaggtacttgtagccaggaagcaccagaccccggccgtcgtcctgcttttgctggttggctttgggcttcggggctccaggtttcagcgcccaccactcgcgaatgccctcagagaggttgtcctcgagccaatctggaagataaccatcggcagccatacctgatctaaatcatttattgttcaaagatgcagtcatccaaatccacattgaccagatcgcaggcagtgcaagcgtctggcacctttcccatgatatgatgaatgtagcacagtttctgatacgcctttttgacgacagaaacgggttgagattctgacacgggaaagcactctaaacagtctttctgtccgtgagtgaagcagatatttgaattctgattcattctctcgcattgtctgcagggaaacagcatcagattcatgcccacgtgacgagaacatttgttttggtacctgtccgcgtagttgatcgaagcttccgcgtctgacgtcgatggctgcgcaactgactcgcgcacccgtttgggctcacttatatctgcgtcactgggggcgggtcttttcttggctccaccctttttgacgtagaattcatgctccacctcaaccacgtgatcctttgcccaccggaaaaagtctttgacttcctgcttggtgaccttcccaaagtcatgatccagacggcgggtgagttcaaatttgaacatccggtcttgcaacggctgctggtgttcgaaggtcgttgagttcccgtcaatcacggcgcacatgttggtgttggaggtgacgatcacgggagtcgggtctatctgggccgaggacttgcatttctggtccacgcgcaccttgcttcctccgagaatggctttggccgactccacgaccttggcggtcatcttcccctcctcccaccagatcaccatcttgtcgacacagtcgttgaagggaaagttctcattggtccagttgacgcagccgtagaagggcgaattc

SEQ ID NO: 149 - protein, 733 aa, Artificial Sequence
  source: /note="Description of Artificial Sequence: Synthetic polypeptide"
MAADGYLPDWLEDNLSEGIREWWDLKPGAPKLKANQQKQDDGRGLVLPGYKYLGPFHGLDKGEPVNAADAAALEHDKAYDQQLKAGDNPYLRYNHADAEFQERLQEDTSFGGNLGRAVFQAKKRVLEPLGLVEEGAKTAPGKKRPLESPQEPDSSSGIGKKGKQPAKKRLNFEEDTGAGDGPPEGSDTSAMSSDIEMRAAPGGNAVDAGQGSDGVGNASGDWHCDSTWSEGKVTTTSTRTWVLPTYNNHLYLRLGTTSNSNTYNGFSTPWGYFDFNRFHCHFSPRDWQRLINNNWGLRPKAMRVKIFNIQVKEVTTSNGETTVANNLTSTVQIFADSSYELPYVMDAGQEGSLPPFPNDVFMVPQYGYCGIVTGENQNQTDRNAFYCLEYFPSQMLRTGNNFEMAYNFEKVPFHSMYAHSQSLDRLMNPLLDQYLWHLQSTTSGETLNQGNAATTFGKIRSGDFAFYRKNWLPGPCVKQQRFSKTASQNYKIPASGGNALLKYDTHYTLNNRWSNIAPGPPMATAGPSDGDFSNAQLIFPGPSVTGNTTTSANNLLFTSEGEIAATNPRDTDMFGQIADNNQNATTAPITGNVTAMGVLPGMVWQNRDIYYQGPIWAKIPHADGHFHPSPLIGGFGLKHPPPQIFIKNTPVPANPATTFTAARVDSFITQYSTGQVAVQIEWEIEKERSKRRNPEVQFTSNYGNQSSMLWAPDTTGKYTEPRVIGSRYLTNHL

SEQ ID NO: 150 - protein, 735 aa, Artificial Sequence
  source: /note="Description of Artificial Sequence: Synthetic polypeptide"
MAADGYLPDWLEDTLSEGIRQWWKLKPGPPPPKPNQQHRDDSRGLVLPGYKYLGPFNGLDKGEPVNEADAAALEHDKAYDHQLKQGDNPYLKYNHADAEFQERLQEDTSFGGNLGRAVFQAKKRVLEPLGLVEEAVKTAPGKKRPIEQSPAEPDSSSGIGKSGQQPAKKRLNFGQTGDTESVPDPQPIGEPPAAPSGVGSNTMASGGGAPMADNNEGADGVGNSSGNWHCDSTWMGDRVITTSTRTWALPTYNNHLYKQISSESGATNDNHYFGYSTPWGYFDFNRFHCHFSPRDWQRLINNNWGFRPKKLNFKLFNIQVKEVTQNDGTTTIANNLTSTVQVFTDSEYQLPYVLGSAHQGCLPPFPADVFMIPQYGYLTLNNGSQAVGRSSFYCLEYFPSQMLRTGNNFTFSYTFEDVPFHSSYAHSQSLDRLMNPLIDQYLYYLSKTQGTSGTTQQSRLQFSQAGPSSMAQQAKNWLPGPSYRQQRMSKTANDNNNSEFAWTAATKYYLNGRNSLVNPGPPMASHKDDEEKYFPMHGNLIFGKQGTGTTNVDIESVLITDEEEIRTTNPVATEQYGQVATNHQSQNTTASYGSVDSQGILPGMVWQDRDVYLQGPIWAKIPHTDGHFHPSPLMGGFGLKHPPPQILIKNTPVPANPATTFTPGKFASFITQYSTGQVSVEIEWELQKENSKRWNPEIQYTSNYNKSVNVEFTVDANGVYSEPRPIGTRYLTRNL

SEQ ID NO: 151 - DNA, 3127 bp, Artificial Sequence
  source: /note="Description of Artificial Sequence: Synthetic polynucleotide"
gcggccgcgaattcgcccttcgcagagaccaaagttcaactgaaacgaatcaaccggtttattgattaacatgcaattacagattacgggtgaggtaacgagtgccaatagggcgaggctcagagtaaacaccctggctgtcaacggcaaagtccacaccagtctgcttttcaaagttggaggtgtactgaatctccgggtcccagcgcttgctgttttccttctgcagctcccactcgatttccacgctgacttgtccggtgctgtactgtgtgatgaacgaagcaaacttggcaggagtaaacacctccggaggattagcgggaacgggagtgttcttgatcaggatctgaggaggcggatgtttaagtccaaagccgcccatcaaaggagacgggtgaaagttgccatccgtgtgaggaatcttggcccagatgggaccctgcaggtacacgtcccggttctgccagaccatgccaggtaaggctccctggttgttgacaacttgtgtctgggctgcagtattagccgcttgtaagttgctgctgactatcccgtattcttccgtggctacaggattagtaggacgaatttcttcttcatttgtcattaacacattttccaatgtagttttgttagttgctccagtttttccaaaaatcaggactccgctggatgggaaaaagcggtcctcgtcgtccttgtgagttgccatggcgacgccgggattaaccaacgagtttctgccgttcaggtgatatttggtggcaccagtccaagcaaagttgctgttgttgttttgatccagcgttttggagaccctttgttgccggaagcagggtccaggtaaccaattcttggcttgttcggccatagttgaaggcccgccctggtaaaactgcagttcccgattgccagctgtgcctcctgggtcactctgtgttctggccaggtagtacaagtactggtcgatgaggggattcatcagccggtccaggctctggctgtgtgcgtagctgctgtggaaaggcacgtcctcgaagctgtagctgaactcaaagttgttgcccgttctcagcatctgagaggggaagtactccaggcagtagaaggaggaacgtcccacagactgactgccattgttgagagtcaggtagccgtactgaggaatcatgaagacgtccgccgggaacggaggcaggcagccctggtgcgcagagccgaggacgtacggcagctggtattccgagtccgagaatacctgaatcgtgctggtaaggttattagcgatggtcgtaacgccgtcattcgtcgtgacctccttgacctggatgttgaagagcttgaaccgcagcttcttgggccggaatccccagttgttgttgatgagtcgctgccagtcacgtggtgagaagtggcagtggaatctgttaaagtcaaaatacccccagggggtgctgtagccgaagtaggtgttgtcgttggtactacctgcagtttcactggagatttgctcgtagaggtggttgttgtaggtgggcagggcccaggttcgggtgctggtggtaatgactctgtcgcccagccatgtggaatcgcaatgccaatttcctgaggcattacccactccgtcggcaccttcgttattgtctgccattggtgcgccaccgcctgcagccactgtaccagatcccacactagagggcgctgctggaggttctccgagaggttgagggtcggggactgactctgagtcgccagtctgaccgaaattgagtctctttctggcgggctgctggcccttcttgccgatgcccgtggaggagtcgggggaacgctgaggtgacggctctaccggtctcttctttgcaggagccgtcttagcgccttcctcaaccagaccgagaggttcgagaacccgcttcttggcctggaagactgctcgcccgaggttgcccccaaatgacgtatcttcttgcagacgctcctgaaactcggcgtcggcgtggttataccgcaggtacgggttgtcacccgcattgagctgctggtcgtaggccttgtcgtgctcgagggccgctgcgtccgccgcgttgacgggctcccccttgtcgagtccgttgaagggtccgaggtacttgtagccaggaagcaccagaccccggccgttgtcctgcttttgctggttggctttgggtttcggggctccaggtttcaggtcccaccactcgcgaatgccctcagagaggttgtcctcgagccaatctggaagataaccatcggcagccatacctgatttaaatcatttattgttcaaagatgcagtcatccaaatccacattgaccagatcgcaggcagtgcaagcgtctggcacctttcccatgatatgatgaatgtagcacagtttctgatacgcctttttgacgacagaaacgggtttagattctgacacgggaaagcactctaaacagtctttctgtccgtgagtgaagcagatatttgaattctgattcattctctcgcattgtctgcagggaaacagcatcagattcatgcccacgtgacgagaacatttgttttggtacctgtctgcgtagttgatcgaagcttccgcgtctgacgtcgatggctgcgcaactgactcgcgcacccgtttgggctcacttatatctgcgtcactgggggcgggtcttttcttggctccaccctttttgacgtagaattcatgctccacctcaaccacgtaatcctttgcccaccggaaaaagtctttgacttcctgcttggtgaccttcccaaagtcatgatccagacggcgggtgagttcaaatttgaacatccggtcttgcaacggctgctggtgttcgaaggtcgttgagttcccgtcgatcacggcgcacatgttggtgttggagatgacgatcgcgggagtcgggtctatctgggccgaggacttgcatttctggtccacgcgcaccttgcttcctccgagaatggctttggccgactccacgaccttggcggtcatcttcccctcctcccaccagatcaccatcttgtcgacacagtcgttgaagggaaagttctcattggtccagttgacgcagccgtagaaagggcgaattc

SEQ ID NO: 152 - protein, 728 aa, Artificial Sequence
  source: /note="Description of Artificial Sequence: Synthetic polypeptide"
MAADGYLPDWLEDNLSEGIREWWDLKPGAPKPKANQQKQDDGRGLVLPGYKYLRPFNGLDKGEPVNEADAAALEHDKAYDKQLEQGDNPYLKYNHADAEFQERLQEDTSFGGNLGRAVFQAKKRVLEPLGLVEEVAKTAPGKKRPIESPDSSTGIGKKGQQPAKKKLNFGQTGDSESVPDPQPLGEPPAAPSGLGSGTMAAGGGAPMADNNEGADGVGNASGNWHCDSTWLGDRVITTSTRTWALPTYNNHLYKQISSQSGATNDNHFFSYSTPWGYFDFNRFHCHFSPRDWQRLINNNWGFRPRKLRFKLFNIQVKEVTTNDGVTTIANNLTSTIQVFSDSEYQLPYVLGSAHQGCLPPFPADVFMIPQYGYLTLNNGSQSVGRSSFYCLEYFPSQMLRTGNNFEFSYTFEEVPFHSSYVHSQSLDRLMNPLIDQYLYYLARTQSTTGSTRELQFHQAGPNTMAEQSKNWLPGPCYRQQRLSKNIDSNNNSNFAWTGATKYHLNGRNSLTNPGVAMATNKDDEDQFFPINGVLVFGKTGAANKTTLENVLMTSEEEIKTTNPVATEEYGVVSSNLQSSTAGPQTQTVNSQGALPGMVWQNRDVCLQGPIWAKIPHTDGNFHPSPLMGGFGLKHPPPQILIKNTPVPANPPEVFTPAKFASFITQYSTGQVSVEIEWELQKENSKRWNPEIQYTSNYAKSNNVEFAVNNEGVYTEPRPIGTRYLTRNL

SEQ ID NO: 153 - DNA, 3106 bp, Artificial Sequence
  source: /note="Description of Artificial Sequence: Synthetic polynucleotide"
gcggccgcgaattcgcccttcgcagagaccaaagttcaactgaaacgaatcaaccggtttattgattaacaagtaattacaggttacgggtgaggtaacgggtgccaatggggcgaggctcagtataaaccccttcgttgttgacagcaaattccacattattagacttggcataatttgaggtgtactgaatctctggattccagcgtttgctgttttctttctgcagttcccactcgatctccacgctgacctggccggtgctgtactgcgtgataaatgaggcaaacttggcaggagtaaacacctctggaggattagcaggtaccggggtgtttttgatgagaatttgaggaggcgggtgtttgagtccaaatccgcccatcaggggagacgggtgaaagttgccgtccgtgtgaggaattttggcccagatgggaccctgcaggcacacgtcccggttctgccagaccatgccgggcagagccccctggctgttgacagtctgtgtctggggtccggccgtagacgattgcaggttgctggagaccacaccgtattcttctgtagccacgggattggtggttttgatctcctcctcgctggtcattagcacgttttccagcgttgtcttgttggcagcccccgttttgccaaaaaccagcactccgttgatgggaaagaactggtcctcgtcgtccttgttggtggccatggctacgcccgggttggttaatgaatttctaccattcagatggtatttagtggccccggtccaggcaaagttactgttgttgttgctgtctatgttttttgacagtctctgctgccgataacagggtccgggcagccagttctttgattgctcggccatggtgttgggcccagcctgatggaactgcagctcccttgtggaccccgtagtgctctgggtccgggccaggtagtacaggtactggtcgatgaggggattcatcagccggtctaggctctggctgtgcacatagctgctgtggaaaggcacttcctcaaaggtgtagctgaattcaaagttattgcccgttctcagcatctgagaaggaaagtactccaggcagtagaaggaggaacgtcccacagactgactgccgttgtttagagtcagatatccgtactgaggaatcatgaacacgtccgcagggaacggagggaggcagccctggtgcgcagagccgaggacgtacggcagttggtactccgagtccgagaagacctgaatcgtgctggtaaggttattagcgatggtcgtaacgccgtcgttcgtcgtgacctccttgacctggatgttgaacaacttgaaccgcagctttctgggccggaatccccagttgttgttgatgagtcgctgccagtcacgtggtgagaagtggcagtggaatctgttgaagtcaaaatagccccagggggtgctgtagctgaagaagtggttgtcgttggtagccccgctctgacttgatatctgcttgtagaggtggttgttgtaggtgggcagggcccaggtgcgggtgctggtggtgatgactctgtcgcccagccatgtggaatcgcaatgccaatttccggaggcattacccactccgtcggcgccttcgttattgtctgccattggtgcgccaccgcctgcagccattgtaccagatcccagacctgagggcgcggcgggaggttctccgagaggttgggggtcgggcactgactctgagtcgccagtctgcccaaagttgagcttctttttagcgggctgctggcctttcttgccgatgcccgtggaggagtcgggggattctatgggtctcttctttccaggagccgtcttagcgacttcctcaaccagaccgagaggttcgagaacccgcttcttggcctggaagactgctcgcccgaggttgcccccaaaagacgtatcttcttgaagacgctcctgaaactcggcgtcggcgtggttgtacttgaggtacgggttgtccccctgctcgagctgcttgtcgtaggccttgtcgtgctcgagggccgcggcgtctgcctcgttgaccggctctcccttgtcgagtccgttgaagggtctgaggtacttgtagccaggaagcaccagaccccggccgtcgtcctgcttttgctggttggctttgggtttcggggctccaggtttcaagtcccaccactcgcgaatgccctcagagaggttgtcctcgagccaatctggaagataaccatcggcagccatacctggtttaagtcatttattgctcagaaacacagtcatccaggtccacgttgaccagatcgcaggccgagcaagcaatctcgggagcccgccccagcagatgatgaatggcacagagtttccgatacgtcctctttctgacgaccggttgagattctgacacgccggggaaacattctgaacagtctctggtcccgtgcgtgaagcaaatgttgaaattctgattcactctctcgcatgtcttgcagggaaacagcatctgaagcatgcccgcgtgacgagaacatttgttttggtacctgtcggcaaagtccaccggagctccttccgcgtctgacgtcgatggattcgcgactgaggggcaggcccgcttgggctcgcttttatccgcgtcatcgggggcgggtctcttgttggccccaccctttctgacgtagaacccatgcgccacctcggtcacgtgatcctgcgcccagcggaagaaccttttgacttcctgctttgtcaccttgccaaagttatgctccagacggcgggtgggttcaaatttgaacatccggtcctgcaacggctgctggtgctcgaaggtggcgctgttcccgtcaatcacggcgcacatgttggtgttggaggtgacggtcacgggggtggggtcgatctgggcggacgacttgcacttttggtccacgcgcaccttgctgccgccgagaatggccttggcggactccacgaccttggccgtcatcttgccctcctcccaccagatcaccatcttgtcggcgcaatcgttgaagggaaagttctcattggtccagttgacgcagccgtagaaagggcgaattc

SEQ ID NO: 154 - protein, 728 aa, Artificial Sequence
  source: /note="Description of Artificial Sequence: Synthetic polypeptide"
MAADGYLPDWLEDNLSEGIREWWDLKPGAPKPKANQQKQDDGRGLVLPGYKYLGPFNGLDKGEPVNEADAAALEHDKAYDKQLEQGDNPYLKYNHADAEFQERLQEDTSFGGNLGRAVFQAKKRVLEPLGLVEEGAKTASGKKRPIESPDSSTGIGKKGQQPAKKKLNFGQTGDSESVPDPQPLGEPPAAPSGLGSGTMAAGGGAPMADNNEGADGVGNASGNWHCDSTWLGDRVITTSTRTWALPTYNNHLYKQISSQSGATNDNHFFGYSTPWGYFDFNRFHCHFSPRDWQRLINNNWGFRPRKLRFKLFNIQVKEVTTNDGVTTIANNLTSTIQVFSDSEYQLPYVLGSAHQGCLPPFPADVFMIPQYGYLTLNNGSQSVGRSSFCCLEYFPSQMLRTGNNFEFSYTFEEVPFHSSYAHSQSLDRLMNPLIDQYLYYLARTQSTTGSTRELQFHQAGPNTVAEQSKNWLPGPCYRQQRLSKNIDSNNNSNFAWTGATKYHLNGRNSLTNPGVAMATNKDDEDQFLPINGVLVFGKTGAANKTTLENVLMTSEEEIKTTNPVATEEYGVVSSNLQSSTAGPRTQTVNSQGALPGMVWQNRDVYLQGPIWAEIPHTDGNFHPSPLMGGFGLKHPPPQILIKNTPVPANPPEVFTPAKFASFITQYSTGQVSVEIEWELQKENSKRWNPEIQYTSNYAKSNNVEFAVNNEGVYTEPRPIGTRYLTRNL

SEQ ID NO: 155 - DNA, 3102 bp, Artificial Sequence
  source: /note="Description of Artificial Sequence: Synthetic polynucleotide"
gcggccgcgaattcgcccttcgcagagaccaaagttcaactgaaacgaatcaaccggtttattgattaacaagtaattacaggttacgggtgaggtaacgggtgccaatggggcgaggctcagtataaaccccttcgttgttgacagcaaattccacattattagacttggcataatttgaggtgtactgaatctctggattccagcgtttgctgttttctttctgcagttcccactcgatctccacgctgacctggccggtgctgtactgcgtgataaatgaggcaaacttggcaggagtaaacacctctggaggattagcaggtaccggggtgtttttgatgagaatttgaggaggcgggtgtttgagtccaaatccgcccatcaggggagacgggtgaaagttgccgtccgtgtgaggaatttcggcccagatgggaccctgcaggtacacgtcccggttctgccagaccatgccgggcagagccccctggctgttgacagtctgtgtccggggtccggccgtagacgattgcaggttgctggagaccacaccgtattcttctgtagccacgggattggtggttttgatctcctcctcgctggtcattagcacgttttccagcgttgtcttgttggcagcccccgttttgccaaaaaccagcactccgttgatgggaaggaactggtcctcgtcgtccttgttggtggccatggctacgcccgggttggttaatgaatttctaccattcagatggtatttagtggccccggtccaggcaaagttactgttgttgttgctgtctatgttttttgacagtctctgctgccgataacagggtccgggcagccagttctttgattgctcggccacggtgttgggcccagcctgatggaactgcagctcccttgtggaccccgtagtgctctgggtccgggccaggtagtacaggtactggtcgatgaggggattcatcagccggtccaggctctggctgtgcgcatagctgctgtggaaaggcacttcctcaaaggtgtagctgaattcaaagttattgcccgttctcagcatctgagaaggaaagtactccaggcagcagaaggaggaacgtcccacagactgactgccgttgtttagagtcagatatccgtactgaggaatcatgaacacgtccgcagggaacggagggaggcagccctggtgcgcagagccgaggacgtacggcagttggtactccgagtccgagaagacctgaatcgtgctggtaaggttattagcgatggtcgtaacgccgtcgttcgtcgtgacctccttgacctggatgttgaacaacttgaaccgcagctttctgggccggaatccccagttgttgttgatgagtcgctgccagtcacgtggtgagaagtggcagtggaatctgttgaagtcaaaatagccccagggggtgctgtagccgaagaagtggttgtcgttggtagccccgctctgacttgatatctgcttgtagaggtggttgttgtaggtgggcagggcccaggtgcgggtgctggtggtgatgactctgtcgcccagccatgtggaatcgcaatgccaatttccggaggcattacccactccgtcggcgccttcgttattgtctgccattggtgcgccaccgcctgcagccattgtaccagatcccagacctgagggcgcggcgggaggttctccgagaggttgggggtcgggcactgactctgagtcgccagtctgcccaaagttgagcttctttttagcgggctgctggcctttcttgccgatgcccgtggaggagtcgggggattctatgggtctcttctttccggaagccgtcttagcgccttcctcaaccagaccgagaggttcgagaacccgcttcttggcctggaagactgctcgcccgaggttgcccccaaaagacgtatcttcttgaagacgctcctgaaactcggcgtcggcgtggttgtacttgaggtacgggttgtccccctgctcgagctgcttgtcgtaggccttgtcgtgctcgagggccgcggcgtctgcctcgttgaccggctctcccttgtcgagtccgttgaagggtccgaggtacttgtagccaggaagcaccagaccccggccgtcgtcctgcttttgctggttggctttgggtttcggggctccaggtttcaagtcccaccactcgcgaatgccctcagagaggttgtcctcgagccaatctggaagataaccatcggcagccatacctggtttaagtcatttattgctcagaaacacagtcatccaggtccacgttgaccagatcgcaggccgagcaagcaatctcgggagcccgccccagcagatgatgaatggcacagagtttccgatacgtcctctttctgacgaccggttgagattctgacacgccggggaaacattctgaacagtctctggtcccgtgcgtgaagcaaatgttgaaattctgattcattctctcgcatgtcttgcagggaaacagcatctgaagcatgcccgcgtgacgagaacatttgttttggtacctgtcggcaaagtccaccggagctccttccgcgtctgacgtcgatggatccgcgactgaggggcaagcccgcttgggctcgcttttatccgcgtcatcgggggcgggtctcttgttggctccaccctttctgacgtagaactcatgcgccacctcggtcacgtgatcctgcgcccagcggaagaactctttgacttcctgctttgtcaccttgccaaagtcatgctccagacggcgggtgagttcaaatttgaacatccggtcttgtaacggctgctggtgctcgaaggtggtgctgttcccgtcaatcacggcgcacatgttggtgttggaagtgacgatcacgggggtgggatcgatctgggcggacgacttgcacttttggtccacgcgcaccttgctgccgccgagaatggccttggcggactccacgaccttggccgtcatcttgccctcctcccaccagatcaccatcttgtcgacgcaatcgttgaagggaaagttctcattggtccagttgacgcagccgaagggcgaattc

SEQ ID NO: 156 - protein, 728 aa, Artificial Sequence
  source: /note="Description of Artificial Sequence: Synthetic polypeptide"
MAADGYLPDWLEDNLSEGIREWWDLKPGAPKPKANQQKQDDGRGLVLPGYRYLGPFNGLDKGEPVNEADAAALEHDKAYDKQLEQGDNPYLKYNHADAEFQERLQEDTSFGGNLGRAVFQAKKRVLEPLGLVEEGAKTAPGKKRPIESPDSSTGIGKNGQPPAKKKLNFGQTGDSESVPDPQPLGEPPAAPSGLGSGTMAAGGGAPMADNNEGADGVGNASGNWHCDSTWLGDRVITTSTRTWALPTYNNHLYKQISSQSGATNDNHFFGYSTPWGYFDFNRFHCHFSPRDWQRLINNNWGFRPRKLRFKLFNIQVKEVTTNDGVTTIANNLTSTIQVFSDSEYQLPYVLGSAHQGCLPPFPADVFMIPQYGYLTLNNGSQSVGRSSFYCLEYFPSQMLRTGNNFEFSYTFEEVPFHSSYAHSQSLDRLMNPLIDQYLYYLARTQSTTGSTRELQFHQAGPNTMAEQSKNWLPGPCYRQQRLSKNIDSNNNSNFAWTGATKYHLNGRNSLTNPGVAMATNKDDEDQFFPINGVLVFGKTGAANKTTLENVLMTSEEEIKTTNPVATEEYGVVSSNLQSSTAGPQTQTVNSQGALPGMVWQNRDVYLQGPIWAKIPHTDGNFHPSPLMGGFGLKHPPPQILIKNTPVPANPPEVFTPAKFASFITQYSTGQVSVEIEWELQKENSKRWNPEIQYTSNYAKSNNVEFAVNNEGVYTEPRPIGTRYLTRNL

SEQ ID NO: 157 - protein, 728 aa, Artificial Sequence
  source: /note="Description of Artificial Sequence: Synthetic polypeptide"
MAADGYLPDWLEGNLSEGIREWWDLKPGAPKPKANQQKQDDGRGLVLPGYRYLGPFNGLDKGEPVNEADAAALEHDKAYDKQLEQGDNPYLKYNHADAEFQERLQEDTSFGGNLGRAVFQAKKRVLEPLGLVEEGAKTAPGKKRPIESPDSSTGIGKNGQPPAKKKLNFGQTGDSESVPDPQPLGEPPAAPSGLGSGTMAAGGGAPMADNNEGADGVGNASGNWHCDSTWLGDRVITTSTRTWALPTYNNHLYKQISSQSGATNDNHFFGYSTPWGYFDFNRFHCHFSPRDWQRLINNNWGFRPRKLRFKLFNIQVKEVTTNDGVTTIANNLTSTIQVFSDSEYQLPYVLGSAHQGCLPPFPADVFMIPQYGYLTLNNGSQSVGRSSFYCLEYFPSQMLRTGDNFEFSYTFEEVPFHSSYAHSQSLDRLMNPLIDQYLYYLARTQSTTGSTRELQFHQAGPNTMAEQSKNWLPGPCYRQQRLSKNIDSNNNSNFAWTGATKYHLNGRNSLTNPGVAMATNKDDEDQFFPINGVLVFGKTGAANKTTLENVLMTSEEEIKTTNPVATEEYGVVSSNLQSSTAGPQTQTVNSQGALPGMVWQNRDVYLQGPIWAKIPHTDGNFHPSPLMGGFGLKHPPPQILIKNTPVPANPPEVFTPAKFASFITQYSTGQVSVEIEWELQKENSKRWNPEIQYTSNYAKSNNVEFAVNNEGVYTEPRPIGTRYLTRNL

SEQ ID NO: 158 - DNA, 3106 bp, Artificial Sequence
  source: /note="Description of Artificial Sequence: Synthetic polynucleotide"
gcggccgcgaattcgcccttcgcagagaccaaagttcaactgaaacgaatcagccggtttattgattaacaagtaattacaggttacgggtgaggtaacgggtgccaatggggcgaggctcagtataaaccccttcgttgttgacagcaaattccacattattagacttggcataatttgaggtgtactgaatctctggattccagcgtttgctgttttctttctgcagttcccactcgatctccacgctgacctggccggtgctgtactgcgtgataaatgaggcaaacttggcaggagtaaacacctctggaggattagcaggtaccggggtgtttttgatgagaatttgaggaggcgggtgtttgagtccaaatccgcccatcaggggagacgggtgaaagttgccgtccgtgtgaggaattttggcccagatgggaccctgcaggtacacgtcccggttctgccagaccatgccgggcagagccccctggctgttgacagtctgtgtctggggtccggccgtagacgattgcaggttgctggagaccacaccgtattcttctgtagccacgggattggtggttttgatctcctcctcgctggtcattagcacgttttccagcgttgtcttgttggcagcccccgttttgccaaaaaccagcactccgttgatgggaaagaactggtcctcgtcgtccttgttggtggccatggctacgcccgggttggttaatgaatttctaccattcagatggtatttagtggccccggtccaggcaaagttactgttgttgttgctgtctatgttttttgacagtctctgctgccgataacagggtccgggcagccagttctttgattgctcggccatggtgttgggcccagcctgatggaactgcagctcccttgtggaccccgtagtgctctgggtccgggccaggtagtacaggtactggtcgatgaggggattcatcagccggtccaggctctggctgtgcgcatagctgctgtggaaaggcacttcctcaaaggtgtagctgaattcaaagttatcgcccgttctcagcatctgagaaggaaagtactccaggcagtagaaggaggaacgtcccacagactgactgccgttgtttagagtcagatatccgtactgaggaatcatgaacacgtccgcagggaacggagggaggcagccctggtgcgcagagccgaggacgtacggcagttggtactccgagtccgagaagacctgaatcgtgctggtaaggttattagcgatggtcgtaacgccgtcgttcgtcgtgacctccttgacctggatgttgaacaacttgaaccgcagctttctgggccggaatccccagttgttgttgatgagtcgctgccagtcacgtggtgagaagtggcagtggaatctgttgaagtcaaaatagccccagggggtgctgtagccgaagaagtggttgtcgttggtagccccgctctgacttgatatctgcttgtagaggtggttgttgtaggtgggcagggcccaggtgcgggtgctggtggtgatgactctgtcgcccagccatgtggaatcgcaatgccaatttccggaggcattacccactccgtcggcgccttcgttattgtctgccattggtgcgccaccgcctgcagccattgtaccagatcccagacctgagggcgcggcgggaggttctccgagaggttgggggtcgggcactgactctgagtcgccagtctgcccaaagttgagcttctttttagcgggcggctggccgttcttgccgatgcccgtggaggagtcgggggattctatgggtctcttctttccaggagccgtcttagcgccttcctcaaccagaccgagaggttcgagaacccgcttcttggcctggaagactgctcgcccgaggttgcccccaaaagacgtatcttcttgaagacgctcctgaaactcggcgtcggcgtggttgtacttgaggtacgggttgtccccctgctcgagctgcttgtcgtaggccttgtcgtgctcgagggccgcggcgtctgcctcgttgaccggctctcccttgtcgagtccgttgaagggtccgaggtacctgtagccaggaagcaccagaccccggccgtcgtcctgcttttgctggttggctttgggtttcggggctccaggtttcaagtcccaccactcgcgaatgccctcagagaggttgccctcgagccaatctggaagataaccatcggcagccatacctggtttaagtcatttattgctcagaaacacagtcatccaggtccacgttggccagatcgcaggccgagcaagcaatctcgggagcccgccccagcagatgatgaatggcacagagtttccgatacgtcctctttctgacgaccggttgagattctgacacgccggggaaacattctgaacagtctctggtcccgtgcgtgaagcaaatgttgaaattctgattcattctctcgcatgtcttgcaggggaacagcatctgaagcatgcccgcgtgacgagaacatttgttttggtacctgtcggcaaagtccaccggagctccttccgcgtctgacgtcgatggatccgcgactgaggggcaggcccgcttgggctcgcttttatccgcgtcatcgggggcgggtctcttgttggctccaccctttctgacgtagaactcatacgccacctcggtcacgtgatcctgcgcccagcggaagaactctttgacttcctgctttgtcaccttgccaaagtcatgctccagacggcgggtgagttcaaatttgaacatccggtcttgtaacggctgctggtgctcgaaggtggtgctgttcccgtcaatcacggcgcacatgttggtgttggaagtgacgatcacgggggtgggatcgatctgggcggacgacttgcacttttggtccacgcgcaccttgctgccgccgagaatggccttggcggactccacgaccttggccgtcatcctgccctcctcccaccagatcaccatcttgtcgacgcaatcgttgaagggaaagttctcattggtccagttgacgcagccgtagaaagggcgaattc

SEQ ID NO: 159 - protein, 728 aa, Artificial Sequence
  source: /note="Description of Artificial Sequence: Synthetic polypeptide"
MAADGYLPDWLEDNLSEGIREWWDLKPGAPKPKANQQKQDDGRGLVLPGYKYLGPFNGLDKGEPVNEADAAALEHDKAYDKQLEQGDNPYLKYNHADAEFQERLQEDTSFGGNLGRAVFQAKKRVLEPLGLVEEGAKTAPGKKRPIESPDSSTGIGKKGQQPAKKKLNFGQTGDSESVPDPQPLGEPPAAPSGLGSGTMAAGGGAPMADNNEGADGVGNASGNWHCDSTWLGDRVITTSTRTWALPTYNNHLYKQISSQSGATNDNHFFGYSTPWGYFDFNRFHCHFSPRDWQRLINNNWGFRPRKLRFKLFNIQVKEVTTNDGVTTIANNLTSTIQVFSDSEYQLPYVLGSAHQGCLPPFPADVFMIPQYGYLTLNNGSQSMGRSSFYCLEYFPSQMLRTGNNFEFSYTFEEVPFHSSYAHSQSLDRLMNPLIDQYLYYLARTQSTTGSTRELQFHQAGPNTMAEQSKNWLPGPCYRQQRLSKNIDSNNNSNFAWTGATKYHLNGRNSLTNPGVAMATNKDDEGQFFPINGVLVFGKTGAANKTTLENVLMTSEEEIKTTNPVATEEYGVVSSNLQSSTAGPQTQTVNSQGALPGMVWQNRDVYLQGPIWAKIPHTDGNFHPSPLMGGFGLKHPPPQILIKNTPVPANPPGVFTPALFASFITQYSTGQVSVEIEWELQKENSKRWNPEIQYTSNYAKSNNVEFAVNNEGVYTEPRPIGTRYLTRNL

SEQ ID NO: 160 - DNA, 3098 bp, Artificial Sequence
  source: /note="Description of Artificial Sequence: Synthetic polynucleotide"
gaattcgcccttcgcagagaccaaagttcaactgaaacgaatcaaccggtttattgattaacaagtaattacaggttacgggtgaggtaacgggtgccaatggggcgaggctcagtataaaccccttcgttgttgacagcaaattccacattattagacttggcataatttgaggtgtactgaatctctggattccagcgtttgctgttttctttctgcagttcccactcgatctccacgctgacctggccggtgctgtactgcgtgataaatgaggcaaactaggcaggagtaaacacccctggaggattagcaggtaccggggtgtttttgatgagaatttgaggaggcgggtgtttgagtccaaatccgcccatcaggggagacgggtgaaagttgccgtccgtgtgaggaattttggcccagatgggaccctgcaggtacacgtcccggttctgccagaccatgccgggcagagccccctggctgttgacagtctgtgtctggggtccggccgtagacgattgcaggttgctggagaccacaccgtattcttctgtagccacgggattggtggttttgatctcctcctcgctggtcattagcacgttttccagcgttgtcttgttggcagcccccgttttgccaaaaaccagcactccgttgatgggaaagaactggccctcgtcgtccttgttggtggccatggctacgcccgggttggttaatgaatttctaccattcagatggtatttagtggccccggtccaggcaaagttactgttgttgttgctgtctatgttttttgacagtctctgctgccgataacagggtccgggcagccagttctttgattgctcggccatggtgttgggcccagcctgatggaactgcagctcccttgtggaccccgtagtgctctgggtccgggccaggtagtacaggtactggtcgatgaggggattcatcagccggtccaggctctggctgtgcgcatagctgctgtggaaaggcacttcctcaaaggtgtagctgaattcaaagttattgcccgttctcagcatctgagaaggaaagtactccaggcagtagaaggaggaacgtcccatagactgactgccgttgtttagagtcagatatccgtactgaggaatcatgaacacgtccgcagggaacggagggaggcagccctggtgcgcagagccgaggacgtacggcagttggtactccgagtccgagaagacctgaatcgtgctggtaaggttattagcgatggtcgtaacgccgtcgttcgtcgtgacctccttgacctggatgttgaacaacttgaaccgcagctttctgggccggaatccccagttgttgttgatgagtcgctgccagtcacgtggtgagaagtggcagtggaatctgttgaagtcaaaatagccccagggggtgctgtagccgaagaagtggttgtcgttggtagccccgctctgacttgatatctgcttgtagaggtggttgttgtaggtgggcagggcccaggtgcgggtgctggtggtgatgactctgtcgcccagccatgtggaatcgcaatgccaatttccggaggcattacccactccgtcggcgccttcgttattgtctgccattggtgcgccaccgcctgcagccattgtaccagatcccagacctgagggcgcggcgggaggttctccgagaggttgggggtcgggcactgactctgagtcgccagtctgcccaaagttgagcttctttttagcgggctgctggcctttcttgccgatgcccgtggaggagtcgggggattctatgggtctcttctttccaggagccgtcttagcgccttcctcaaccagaccgagaggttcgagaacccgcttcttggcctggaagactgctcgcccgaggttgcccccaaaagacgtatcttcttgaagacgctcctgaaactcagcgtcggcgtggttgtacttgaggtacgggttgtccccctgctcgagctgcttgtcgtaggccttgtcgtgctcgagggccgcggcgtctgcctcgttgaccggctctcccttgtcgagtccgttgaagggtccgaggtacttgtagccaggaagcaccagaccccggccgtcgtcctgcttttgctggttggctttgggtttcggggctccaggtttcaagtcccaccactcgcgaatgccctcagagaggttgtcctcgagccaatctggaagataaccatcggcagccatacctggtttaagtcatttattgctcagaaacacagtcatccaggtccacgttgaccagatcgcaggccgagcaagcaatctcgggagcccgccccagcagatgatgaatggcacagagtttccgatacgtcctctttctgacgaccggttgagattctgacacgccggggaaacattctgaacagtctctggtcccgtgcgtgaagcaaatgttgaaattctgattcattctctcgcatgtcttgcagggaaacagcatctgaagcatgcccgcgtgacgagaacatttgttttggtacctgtcggcaaagtccaccggagctccttccgcgtctgacgtcgatggatccgcgactgaggggcaggcccgcttgggctcgcttttatccgcgtcatcgggggcgggcctcttgttggctccaccctttctgacgtagaactcatgcgccacctcggtcacgtgatcctgcgcccagcggaagaactctttgacttcctgctttgtcaccttgccaaagtcctgctccagacggcgggtgagttcaaatttgaacatccggtcttgtaacggctgctggtgctcgaaggtggtgctgttcccgtcaatcacggcgcacatgttggtgttggaagtgacgatcacgggggtgggatcgatctgggcggacgacttgcacttttggtccacgcgcaccttgctgccgccgagaatggccttggcggactccacgaccttggccgtcatcttgccctcctcccaccagatcaccatcttgtcgacgcaatcgttgaagggaaagttctcattggtccagttgacgcagccgtagaaagggcgaattc

SEQ ID NO: 161 - DNA, 2187 bp, Artificial Sequence
  source: /note="Description of Artificial Sequence: Synthetic polynucleotide"
atggctgccgatggttatcttccagattggctcgagggcaacctctctgagggcattcgcgagtggtgggacttgaaacctggagccccgaaacccaaagccaaccagcaaaagcaggacgacggccggggtctggtgcttcctggctacaggtacctcggacccttcaacggactcgacaagggagagccggtcaacgaggcagacgccgcggccctcgagcacgacaaggcctacgacaagcagctcgagcagggggacaacccgtacctcaagtacaaccacgccgacgccgagtttcaggagcgtcttcaagaagatacgtcttttgggggcaacctcgggcgagcagtcttccaggccaagaagcgggttctcgaacctctcggtctggttgaggaaggcgctaagacggctcctggaaagaagagacccatagaatcccccgactcctccacgggcatcggcaagaacggccagccgcccgctaaaaagaagctcaactttgggcagactggcgactcagagtcagtgcccgacccccaacctctcggagaacctcccgccgcgccctcaggtctgggatctggtacaatggctgcaggcggtggcgcaccaatggcagacaataacgaaggcgccgacggagtgggtaatgcctccggaaattggcattgcgattccacatggctgggcgacagagtcatcaccaccagcacccgcacctgggccctgcccacctacaacaaccacctctacaagcagatatcaagtcagagcggggctaccaacgacaaccacttcttcggctacagcaccccctggggctattttgacttcaacagattccactgccacttctcaccacgtgactggcagcgactcatcaacaacaactggggattccggcccagaaagctgcggttcaagttgttcaacatccaggtcaaggaggtcacgacgaacgacggcgttacgaccatcgctaataaccttaccagcacgattcaggtcttctcggactcggagtaccaactgccgtacgtcctcggctctgcgcaccagggctgcctccctccgttccctgcggacgtgttcatgattcctcagtacggatatctgactctaaacaacggcagtcagtctgtgggacgttcctccttctactgcctggagtactttccttctcagatgctgagaacgggcgataactttgaattcagctacacctttgaggaagtgcctttccacagcagctatgcgcacagccagagcctggaccggctgatgaatcccctcatcgaccagtacctgtactacctggcccggacccagagcactacggggtccacaagggagctgcagttccatcaggctgggcccaacaccatggccgagcaatcaaagaactggctgcccggaccctgttatcggcagcagagactgtcaaaaaacatagacagcaacaacaacagtaactttgcctggaccggggccactaaataccatctgaatggtagaaattcattaaccaacccgggcgtagccatggccaccaacaaggacgacgaggaccagttctttcccatcaacggagtgctggtttttggcaaaacgggggctgccaacaagacaacgctggaaaacgtgctaatgaccagcgaggaggagatcaaaaccaccaatcccgtggctacagaagaatacggtgtggtctccagcaacctgcaatcgtctacggccggaccccagacacagactgtcaacagccagggggctctgcccggcatggtctggcagaaccgggacgtgtacctgcagggtcccatctgggccaaaattcctcacacggacggcaactttcacccgtctcccctgatgggcggatttggactcaaacacccgcctcctcaaattctcatcaaaaacaccccggtacctgctaatcctccagaggtgtttactcctgccaagtttgcctcatttatcacgcagtacagcaccggccaggtcagcgtggagatcgagtgggaactgcagaaagaaaacagcaaacgctggaatccagagattcagtacacctcaaattatgccaagtctaataatgtggaatttgctgtcaacaacgaaggggtttatactgagcctcgccccattggcacccgttacctcacccgtaacctgtaa

SEQ ID NO: 162 - protein, 728 aa, Artificial Sequence; identical to SEQ ID NO: 157
  source: /note="Description of Artificial Sequence: Synthetic polypeptide"

SEQ ID NO: 163 - protein, 728 aa, Artificial Sequence
  source: /note="Description of Artificial Sequence: Synthetic polypeptide"
MAADGYLPDWLEDNLSEGIREWWDLKPGAPKPKANQQKQDDGRGLVLPGYRYLGPFNGLDKGEPVNEADAAALEHDKAYDKQLEQGDNPYLKYNHADAEFQERLQEDTSFGGNLGRAVFQAKKRVLEPLGLVEEGAKTAPGKKRPIESPDSSTGIGKNGQPPAKKKLNFGQTGDSESVPDPQPLGEPPAAPSGLGSGTMAAGGGAPMADNNEGADGVGNASGNWHCDSTWLGDRVITTSTRTWALPTYNNHLYKQISSQSGATNDNHFFGYSTPWGYFDFNRFHCHFSPRDWQRLINNNWGFRPRKLRFKLFNIQVKEVTTNDGVTTIANNLTSTIQVFSDSEYQLPYVLGSAHQGCLPPFPADVFMIPQYGYLTLNNGSQSVGRSSFYCLEYFPSQMLRTGDNFEFSYTFEEVPFHSSYAHSQSLDRLMNPLIDQYLYYLARTQSTTGSTRELQFHQAGPNTMAEQSKNWLPGPCYRQQRLSKNIDSNNNSNFAWTGATKYHLNGRNSLTNPGVAMATNKDDEDQFFPINGVLVFGKTGAANKTTLENVLMTSEEEIKTTNPVATEEYGVVSSNLQSSTAGPQTQTVNSQGALPGMVWQNRDVYLQGPIWAKIPHTDGNFHPSPLMGGFGLKHPPPQILIKNTPVPANPPEVFTPAKFASFITQYSTGQVSVEIEWELQKENSKRWNPEIQYTSNYAKSNNVEFAVNNEGVYTEPRPIGTRYLTRNL

SEQ ID NO: 164 - protein, 728 aa, Artificial Sequence; identical to SEQ ID NO: 156
  source: /note="Description of Artificial Sequence: Synthetic polypeptide"

SEQ ID NO: 165 - protein, 728 aa, Artificial Sequence
  source: /note="Description of Artificial Sequence: Synthetic polypeptide"
MAADGYLPDWLEDNLSEGIREWWDLKPGAPKPKANQQKQDDGRGLVLPGYKYLGPFNGLDKGEPVNEADAAALEHDKAYDKQLEQGDNPYLKYNHADAEFQERLQEDTSFGGNLGRAVFQAKKRVLEPLGLVEEGAKTAPGKKRPIESPDSSTGIGKNGQPPAKKKLNFGQTGDSESVPDPQPLGEPPAAPSGLGSGTMAAGGGAPMADNNEGADGVGNASGNWHCDSTWLGDRVITTSTRTWALPTYNNHLYKQISSQSGATNDNHFFGYSTPWGYFDFNRFHCHFSPRDWQRLINNNWGFRPRKLRFKLFNIQVKEVTTNDGVTTIANNLTSTIQVFSDSEYQLPYVLGSAHQGCLPPFPADVFMIPQYGYLTLNNGSQSVGRSSFYCLEYFPSQMLRTGNNFEFSYTFEEVPFHSSYAHSQSLDRLMNPLIDQYLYYLARTQSTTGSTRELQFHQAGPNTMAEQSKNWLPGPCYRQQRLSKNIDSNNNSNFAWTGATKYHLNGRNSLTNPGVAMATNKDDEDQFFPINGVLVFGKTGAANKTTLENVLMTSEEEIKTTNPVATEEYGVVSSNLQSSTAGPQTQTVNSQGALPGMVWQNRDVYLQGPIWAKIPHTDGNFHPSPLMGGFGLKHPPPQILIKNTPVPANPPEVFTPAKFASFITQYSTGQVSVEIEWELQKENSKRWNPEIQYTSNYAKSNNVEFAVNNEGVYTEPRPIGTRYLTRNL

SEQ ID NO: 166 - protein, 728 aa, Artificial Sequence
  source: /note="Description of Artificial Sequence: Synthetic polypeptide"
MAADGYLPDWLEDNLSEGIREWWDLKPGAPKPKANQQKQDDGRGLVLPGYKYLGPFNGLDKGEPVNEADAAALEHDKAYDKQLEQGDNPYLKYNHADAEFQERLQEDTSFGGNLGRAVFQAKKRVLEPLGLVEEGAKTAPGKKRPIESPDSSTGIGKKGQQPAKKKLNFGQTGDSESVPDPQPLGEPPAAPSGLGSGTMAAGGGAPMADNNEGADGVGNASGNWHCDSTWLGDRVITTSTRTWALPTYNNHLYKQISSQSGATNDNHFFGYSTPWGYFDFNRFHCHFSPRDWQRLINNNWGFRPRKLRFKLFNIQVKEVTTNDGVTTIANNLTSTIQVFSDSEYQLPYVLGSAHQGCLPPFPADVFMIPQYGYLTLNNGSQSVGRSSFYCLEYFPSQMLRTGNNFEFSYTFEEVPFHSSYAHSQSLDRLMNPLIDQYLYYLARTQSTTGSTRELQFHQAGPNTMAEQSKNWLPGPCYRQQRLSKNIDSNNNSNFAWTGATKYHLNGRNSLTNPGVAMATNKDDEDQFFPINGVLVFGKTGAANKTTLENVLMTSEEEIKTTNPVATEEYGVVSSNLQSSTAGPQTQTVNSQGALPGMVWQNRDVYLQGPIWAKIPHTDGNFHPSPLMGGFGLKHPPPQILIKNTPVPANPPEVFTPAKFASFITQYSTGQVSVEIEWELQKENSKRWNPEIQYTSNYAKSNNVEFAVNNEGVYTEPRPIGTRYLTRNL

SEQ ID NO: 167 - DNA, 2215 bp, Artificial Sequence
  source: /note="Description of Artificial Sequence: Synthetic polynucleotide"
atggctgccgatggttatcttccagattggctcgaggacactctctctgaaggaataagacagtggtggaagctcaaacctggcccaccaccaccaaagcccgcagagcggcataaggacgacagcaggggtcttgtgcttcctgggtacaagtacctcggacccttcaacggactcgacaagggagagccggtcaacgaggcagacgccgcggccctcgagcacgacaaagcctacgaccggcagctcgacagcggagacaacccgtacctcaagtacaaccacgccgacgccgagttccaggagcggctcaaagaagatacgtcttttgggggcaacctcgggcgagcagtcttccaggccaaaaagaggcttcttgaacctcttggtctggttgaggaagcggctaagacggctcctggaaagaagaggcctgtagagcactctcctgtggagccagactcctcctcgggaaccggaaaggcgggccagcagcctgcaagaaaaagattgaattttggtcagactggagacgcagactcagtcccagaccctcaaccaatcggagaacctcccgcagccccctcaggtgtgggatctcttacaatggctgcaggcggtggcgcaccaatggcagacaataacgagggcgccgacggagtgggtaattcctcgggaaattggcattgcgattccacatggatgggcgacagagtcatcaccaccagcacccgaacctgggccctgcccacctacaacaaccacctctacaagcaaatctccaacagcacatctggaggatcttcaaatgacaacgcctacttcggctacagcaccccctgggggtattttgactttaacagattccactgccacttttcaccacgtgactggcagcgactcatcaacaacaactggggattccggcccaagagactcagcttcaagctcttcaacatccaggtcaaggaggtcacgcagaatgaaggcaccaagaccatcgccaataacctcaccagcaccatccaggtgtttacggactcggagtaccagctgccgtacgttctcggctctgcccaccagggctgcctgcctccgttcccggcggacgtgttcatgattccccagtacggctacctaacactcaacaacggtagtcaggccgtgggacgctcctccttctactgcctggaatactttccttcgcagatgctgagaaccggcaacaacttccagtttacttacaccttcgaggacgtgcctttccacagcagctacgcccacagccagagcttggaccggctgatgaatcctctgattgaccagtacctgtactacttgtctcggactcaaacaacaggaggcacgacaaatacgcagactctgggcttcagccaaggtgggcctaatacaatggccaatcaggcaaagaactggctgccaggaccctgttaccgccagcagcgagtatcaaagacatctgcggataacaacaacagtgaatactcgtggactggagctaccaagtaccacctcaatggcagagactctctggtgaatccgggcccggccatggcaagccacaaggacgatgaagaaaagtttttttcctcagagcggggttctcatctttgggaagcaaggctcagagaaaacaaatgtggacattgaaaaggtcatgattacagacgaagaggaaatcaggacaaccaatcccgtggctacggagcagtatggttctgtatctaccaacctccagagaggcaacagacaagcagctaccgcagatgtcaacacacaaggcgttcttccaggcatggtctggcaggacagagatgtgtaccttcaggggcccatctgggcaaagattccacacacggacggacattttcacccctctcccctcatgggtggattcggacttaaacaccctccgcctcagatcctgatcaagaacacgcctgtacctgcggatcctccgaccaccttcaaccagtcaaagctgaactctttcatcacccagtattctactggccaagtcagcgtggagatcgagtgggagctgcagaaggaaaacagcaagcgctggaaccccgagatccagtacacctccaactactacaaatctacaagtgtggactttgctgttaatacagaaggcgtgtactctgaaccccgccccattggcacccgttacctcacccgtaatctgtaa

SEQ ID NO: 168 - protein, 737 aa, Artificial Sequence
  source: /note="Description of Artificial Sequence: Synthetic polypeptide"
MAADGYLPDWLEDTLSEGIRQWWKLKPGPPPPKPAERHKDDSRGLVLPGYKYLGPFNGLDKGEPVNEADAAALEHDKAYDRQLDSGDNPYLKYNHADAEFQERLKEDTSFGGNLGRAVFQAKKRLLEPLGLVEEAAKTAPGKKRPVEHSPVEPDSSSGTGKAGQQPARKRLNFGQTGDADSVPDPQPIGEPPAAPSGVGSLTMAAGGGAPMADNNEGADGVGNSSGNWHCDSTWMGDRVITTSTRTWALPTYNNHLYKQISNSTSGGSSNDNAYFGYSTPWGYFDFNRFHCHFSPRDWQRLINNNWGFRPKRLSFKLFNIQVKEVTQNEGTKTIANNLTSTIQVFTDSEYQLPYVLGSAHQGCLPPFPADVFMIPQYGYLTLNNGSQAVGRSSFYCLEYFPSQMLKTGNNFQFTYTFEDVPFHSSYAHSQSLDRLMNPLIDQYLYYLSRTQTTGGTTNTQTLGFSQGGPNTMANQAKNWLPGPCYRQQRVSKTSADNNNSEYSWTGATKYHLNGRDSLVNPGPAMASHKDDEEKFFPQSGVLIFGKQGSEKTNVDIEKVMITDEEEIRTTNPVATEQYGSVSTNLQRGNRQAATADVNTQGVLPGMVWQDRDVYLQGPIWAKIPHTDGHFHPSPLMGGFGLKHPPPQILIKNTPVPADPPTTFNQSKLNSFITQYSTGQVSVEIEWELQKENSKRWNPEIQYTSNYYKSTSVDFAVNTEGVYSEPRPIGTRYLTRNL

SEQ ID NO: 169 - protein, 737 aa, Artificial Sequence
  source: /note="Description of Artificial Sequence: Synthetic polypeptide"
MAADGYLPDWLEDTLSEGIRQWWKLKPGPPPPKPAERHKDDSRGLVLPGYKYLGPFNGLDKGEPVNEADAAALEHDKAYDRQLDSGDNPYLKYNHADAEFQERLKEDTSFGGNLGRAVFQAKKRLLEPLGLVEEAAKTAPGKKRPVEHSPVEPDSSSGTGKAGQQPARKRLNFGQTGDADSVPDPQPIGEPPAAPSGVGSLTMAAGGGAPMADNNEGADGVGNSSGNWHCDSTWMGDRVITTSTRTWALPTYNNHLYKQISNSTSGGSSNDNAYFGYSTPWGYFDFNRFHCHFSPRDWQRLINNNWGFRPKRLSFKLFNIQVKEVTQNEGTKTIANNLTSTIQVFTDSEYQLPYVLGSAHQGCLPPFPADVFMIPQYGYLTLNNGSQAVGRSSFYCLEYFPSQMLKTGNNFQFTYTFEDVPFHSSYAHSQSLDRLMNPLIDQYLYYLSRTQTTGGTTNTQTLGFSQGGPNTMANQAKNWLPGPCYRQQRVSKTSADNNNSEYSWTGATKYHLNGRDSLVNPGPAMASHKDDEEKFFPQSGVLIFGKQGSEKTNVDIEKVMITDEEEIRTTNPVATEQYGSVSTNLQQGNTQAATADVNTQGVLPGMVWQDRDVYLQGPIWAKIPHTDGHFHPSPLMGGFGLKHPPPQILIKNTPVPADPPTTFNQSKLNSFITQYSTGQVSVEIEWELQKENSKRWNPEIQYTSNYYKSTSVDFAVNTEGVYSEPRPIGTRYLTRNL

SEQ ID NO: 170 - protein, 737 aa, Artificial Sequence
  source: /note="Description of Artificial Sequence: Synthetic polypeptide"
MAADGYLPDWLEDTLSEGIRQWWKLKPGPPPPKPAERHKDDSRGLVLPGYKYLGPFNGLDKGEPVNEADAAALEHDKAYDRQLDSGDNPYLKYNHADAEFQERLKEDTSFGGNLGRAVFQAKKRLLEPLGLVEEAAKTAPGKKRPVEHSPVEPDSSSGTGKAGQQPARKRLNFGQTGDADSVPDPQPIGEPPAAPSGVGSLTMAAGGGAPMADNNEGADGVGNSSGNWHCDSTWMGDRVITTSTRTWALPTYNNHLYKQISNSTSGGSSNDNAYFGYSTPWGYFDFNRFHCHFSPRDWQRLINNNWGFRPKRLSFKLFNIQVKEVTQNEGTKTIANNLTSTIQVFTDSEYQLPYVLGSAHQGCLPPFPADVFMIPQYGYLTLNNGSQAVGRSSFYCLEYFPSQMLRTGNNFQFTYTFEDVPFHSSYAHSQSLDRLMNPLIDQYLYYLSRTQTTGGTTNTQTLGFSQGGPNTMANQAKNWLPGPCYRQQRVSKTSADNNNSEYSWTGATKYHLNGRDSLVNPGPAMASHKDDEEKFFPQSGVLIFGKQGSEKTNVDIEKVMITDEEEIRTTNPVATEQYGSVSTNLQQGNTQAATADVNTQGVLPGMVWQDRDVYLQGPIWAKIPHTDGHFHPSPLMGGFGLKHPPPQILIKNTPVPADPPTTFNQSKLNSFITQYSTGQVSVEIEWELQKENSKRWNPEIQYTSNYYKSTSVDFAVNTEGVYSEPRPIGTRYLTRNL

SEQ ID NO: 171 - protein, 729 aa, Artificial Sequence
  source: /note="Description of Artificial Sequence: Synthetic polypeptide"
MAADGYLPDWLEDNLSEGIREWWDLKPGAPKPKANQQKQDDGRGLVLPGYKYLGPFNGLDKGEPVNAADAAALEHDKAYDQQLKAGDNPYLRYNHADAEFQERLQEDTSFGGNLGRAVFQAKKRVLEPLGLVEEGAKTAPGKKRPIDSPDSSTGIGKKGQQPAKKKLNFGQTGDSESVPDPQPLGEPPAAPSSVGSGTMAAGGGAPTADNNEGADGVGNASGNWHCDSTWLGDRVITTSTRTWALPTYNNHLYKQISSSSSGATNDNHYFGYSTPWGYFDFNRFHCHFSPRDWQRLINNNWGFRPKKLRFKLFNIQVKEVTTNDGVTTIANNLTSTVQVFSDSEYQLPYVLGSAHQGCLPPFPADVFMIPQYGYLTLNNGSQSVGRSSFYCLEYFPSQMLRTGNNFEFSYSFEDVPFHSSYAHSQSLDRLMNPLIDQYLYYLARTQSTTGSTRELQFHQAGPNTMAEQSKNWLPGPCYRQQRLSKNLDFNNNSNFAWTAATKYHLNGRNSLTNPGIPMATNKDDEDQFFPINGVLVFGKTGAANKTTLENVLMTSEEEIKTTNPVATEEYGVVSSNLQSSTAGPQSQTINSQGALPGMVWQNRDVYLQGPIWAKIPHTDGNFHPSPLMGGFGLEHPPPQILIKNTPVPANPPEVFTPAKFASFITQYSTGQVSVEIEWELQKENSKRWNPEIQYTSNYAKSNNVEFAVNPDGVYTEPRPIGTRYLTRNL

SEQ ID NO: 172 - DNA, 3075 bp, Artificial Sequence
  source: /note="Description of Artificial Sequence: Synthetic polynucleotide"
tgagaactttcctttcaacgattgcgtcggacaagatggtgatctggtgggaggaggggaagatgaccgccaaggtcgtggagtcggccaaagccattcttggaggaagcaaggtgcgtgtggaccagaaatgcaagtcctcggcccagatagacccgactcccgtgatcgtcacctccaacaccaacatgtgcgccgtgattgacgggaactcaacgaccttcgagcaccagcagccgttgcaagaccggatgttcaaatttgaacttacccgccgtctggatcatgactttggaaaggtcaccaagcaggaagtgaaagactttttccggtgggcaaaggatcacgtggttgaggtggagcatgaattctacgtcaaaaagggtggagctaagaaaagacccgcccccagtgacgcagatataagtgagcccaaacgggcgcgcgagtcagttgcgcagccatcaacgtcagacgcggaagcttcgatcaactacgcggacaggtaccaaaaacaaatgttctcgtcacgtgggcatgaatctgatgctgtttccctgcagacaatgcgagagaatgaatcagaattcaaatatctgcttcactcacggacagaaagactgtttagagtgctttcccgtgtcagaatctcaacccgtttctgtcgtcaaaaaggcgtatcagaaactgtgctacattcatcatatcatgggaaaggtgccagacgcttgcactgcctgcgatctggtcaatgtggatttggatgactgcatctctgaacaataaatgatttaaatcaggtatggctgccgatggttatcctccagattggctcgaggacactctctctgaagggataagacagtggtggaagctcaaacctggcccaccaccaccaaagcccgcagagcggcataaggacgacagcaggggtcttgtgcttcctgggtacaagtacctcggacccttcaacggactcgacaagggggagccggtcaacgaggcagacgccgcggccctcgagcacgacaaggcctacgaccggcagctcgacagcggagacaacccgtacctcaagtacaaccacgccgacgcagagtttcaggagcgccttaaagaagatacgtcttttgggggcaacctcggacgagcagtcttccaggcgaaaaagagggttcttgaacctctgggcctggttgaggaacctgttaagacggctccgggaaaaaagaggccggtagagcactctcctgtggagccagactcctcctcgggaaccggaaaagcgggccagcggcctgcaagaaaaagattaaattttggtcagactggagacgcagactccgtacctgacccccagcctctcggacagccaccagcagccccctctggtctgggatctactacaatggctacaggcagtggcgcaccaatggcagacaataacgagggtgccgatggagtgggtaattcctcaggaaattggcattgcgattcccaatggctgggcgacagagtcatcaccaccagcacccgaacctgggccctgcccacatacaacaaccacctctacaagcaaatctccagccaatcaggagccagcaacgacaaccactactttggctacagcaccccctgggggtattttgacttcaacagattccactgccacttttcaccacgtgactggcaaagactcatcaacaacaactggggattccggcccaaaagactcaacttcaagctctttaatattcaagtcaaagaggtcacgcagaatgacggtacgacgacgattgccaataaccttaccagcacggttcaggtgtttactgactcggagtaccagctcccgtacgtcctgggctcggcgcatcaaggatgcctcccgccgtttccagcggacgtcttcatggtcccacagtatggatacctcaccctgaacaacgggagtcaggcggtaggacgctcttccttttactgcctggagtactttccttctcagatgctgcgtactggaaacaactttcagttcagctacacttttgaagacgtgcctttccacagcagctacgctcacagccagagtctggatcggctgatgaatcctctgatcgaccagtacctgtattatctgaacaagacacaaacaaatagtggaactcttcagcagtctcggctactgtttagccaagctggaccaaccaacatgtctcttcaagctaaaaactggctgcctggaccttgctacagacagcagcgtctgtcaaaacaggcaaacgacaacaacaacagcaactttccctggactgcagctacaaagtatcatctaaatggccgggactcgttggttaatccaggaccagctatggccagtcacaaggatgacgaagaaaagtttttccccatgcatggaaccctgatatttggtaaacaaggaacaaatgccaacgacgcggatttggaaaatgtcatgattacagatgaagaagaaatcagggccaccaatcccgtggctacggagcagtacgggactgtgtcaaataatttgcaaaactcaaacactggtccaactactggaactgtcaatcgccaaggagcgttacctggtatggtgtggcaggatcgagacgtgtacctgcagggacccatttgggccaagattcctcacaccgatggacactttcatccttctccactgatgggaggttttggactcaaacacccgcctcctcagatcatgatcaaaaacactcccgttccagccaatcctcccacaaacttcagttctgccaagtttgcttctttcatcacacagtattccacgggacaggtcagcgtggagatcgagtgggagctgcagaaggagaacagcaaacgctggaatcccgaaattcagtacacttccaactacaacaagtctgttaatgtggactttactgtggacactaatggtgtgtattcagagcctcgccccattggcaccagatacctgactcgtaatctgtaattgcttgttaatcaataaaccgtttaattcgtttcagttgaactttggtctctgcgaagggcgaa

SEQ ID NO: 173 - DNA, 3142 bp, Artificial Sequence
  source: /note="Description of Artificial Sequence: Synthetic polynucleotide"
aaaacgacgggccagtgattgtaatacgactcactatagggcgaaattgaaattagcggccgcgaattcgcctttcgcagagaccaaagttcaactgaaacgaattaaacggtttattgattaacaagcaattacagattacgagtcaggtatctggtgccaatggggcgaggctctgaatacacaccattagtgtccacagtaaagtccacattaacagacttgttgtagttggaagtgtactgaatttcgggattccagcgtttgctgttctccttctgcagctcccactcgatctccacgctgacctgtcccgtggaatactgtgtgatgaaagaagcaaacttggcagaactgaagtttgtgggaggattggctggaacgggagtgtttttgatcatgatctgaggaggcgggtgtttgagtccaaaacctcccatcagtggagaaggatgaaagtgtccatcggtgtgaggaatcttggcccaaatgggtccctgcaggtacacgtctcgatcctgccacaccataccaggtaacgctccttggtgattgacagttccagtagttggaccagtgtttgagttttgcaaattatttgacacagtcccgtactgctccgtagccacgggattggtggccctgatttcttcttcatctgtaatcatgacattttccaaatccgcgtcgttggcatttgttccttgtttaccaaatatcagggttccatgcatggggaaaaacttttcttcgtcatccttgtgactggccatagctggtcctggattaaccaacgagtcccggccatttagatgatactttgtagctgcagtccagggaaagttgctgttgttgttgtcgtttgcctgttttgacagacgctgctgtctgtagcaaggtccaggcagccagtttttagcttgaagagacatgttggttggtccagcttggctaaacagtagccgagactgctgaagagttccactatttgtttgtgtcttgttcagataatacaggtactggtcgatcagaggattcatcagccgatccagactctggctgtgagcgtagctgctgtggaaaggcacgtcttcaaaagtgtagctgaactgaaagttgtttccagtacgcagcatctgagaaggaaagtactccaggcagtaaaaggaagagcgtcctaccgcctgactcccgttgttcagggtgaggtatccatactgtgggaccatgaagacgtccgctggaaacggcgggaggcatccttgatgcgccgagcccaggacgtacgggagctggtactccgagtcagtaaacacctgaaccgtgctggtaaggttattggcaatcgtcgtcgtaccgtcattctgcgtgacctctttgacttgaatattaaagagcttgaagttgagtcttttgggccggaatccccggttgttgttgacgagtctttgccagtcacgtggtgaaaagtggcagtggaatctgttgaagtcaaaatacccccagggggtgctgtagccaaagtagtggttgtcgttgctggctcctgattggctggagatttgcttgtagaggtggttgttgtatgtgggcagggcccaggttcgggtgctggtggtgatgactctgtcgcccagccattgggaatcgcaatgccaatttcctgaggaattacccactccatcggcaccctcgttattgtctgccattggtgcgccactgcctgtagccattgtagtagatcccagaccagagggggctgctggtggctgtccgagaggctgggggtcaggtacggagtctgcgtctccagtctgaccaaaatttaatctttttcttgcaggctgctggcccgcttttccggttcccgaggaggagtctggctccacaggagagtgctctaccggcctcttttttcccggagccgtcttaacaggctcctcaaccaggcccagaggttcaagaaccctctttttcgcctggaagactgctcgtccgaggttgcccccaaaagacgtatcttctttaaggcgctcctgaaactctgcgtcggcgtggttgtacttgaggtacgggttgtctccgctgtcgagctgccggtcgtaggccttgtcgtgctcgagggccgcggcgtctgcctcgttgaccggctcccccttgtcgagtccgttgaagggtccgaggtacttgtacccaggaagcacaagacccctgctgtcgtccttatgccgctctgcgggctttggtggtggtgggccaggtttgagcttccaccactgtcttattccttcagagagagtgtcctcgagccaatctggaagataaccatcggcagccatacctgatttaaatcatttattgttcagagatgcagtcatccaaatccacattgaccagatcgcaggcagtgcaagcgtctggcacctttcccatgatatgatgaatgtagcacagtttctgatacgcctttttgacgacagaaacgggttgagattctgacacgggaaagcactctaaacagtctttctgtccgtgagtgaagcagatatttgaattctgattcattctctcgcattgtctgcagggaaacagcatcagattcatgcccacgtgacgagaacatttgttttggtacctgtccgcgtagttgatcgaagcttccgcgtctgacgtcgatggctgcgcaactgactcgcgcgcccgtttgggctcacttatatctgcgtcactgggggcgggtcttttcttagctccaccctttttgacgtagaattcatgctccacctcaaccacgtgatcctttgcccaccggaaaaagtctttcacttcctgcttggtgacctttccaaagtcatgatccagacggcgggtaagttcaaatttgaacatccggtcttgcaacggctgctggtgctcgaaggtcgttgagttcccgtcaatcacggcgcacatgttggtgttggaggtgacgatcacgggagtcgggtctatctgggccgaggacttgcatttctggtccacacgcaccttgcttcctccaagaatggctttggccgactccacgaccttggcggtcatcttcccctcctcccaccagatcaccatcttgtcgacgcaatggtaaaaggaaagttctcattgg

SEQ ID NO: 174 - protein, 735 aa, Adeno-associated virus 2
MAADGYLPDWLEDTLSEGIRQWWKLKPGPPPPKPAERHKDDSRGLVLPGYKYLGPFNGLDKGEPVNEADAAALEHDKAYDRQLDSGDNPYLKYNHADAEFQERLKEDTSFGGNLGRAVFQAKKRVLEPLGLVEEPVKTAPGKKRPVEHSPVEPDSSSGTGKAGQQPARKRLNFGQTGDADSVPDPQPLGEPPATPAAVGPTTMASGGGAPMADNNEGADGVGNASGNWHCDSTWLGDRVITTSTRTWALPTYNNHLYKQISSASTGASNDNHYFGYSTPWGYFDFNRFHCHFSPRDWQRLINNNWGFRPKRLNFKLFNIQVKEVTQNDGTTTIANNLTSTVQVFTDSEYQLPYVLGSAHQGCLPPFPADVFMIPQYGYLTLNNGSQAVGRSSFYCLEYFPSQMLRTGNNFTFSYTFEDVPFHSSYAHSQSLDRLMNPLIDQYLYYLNRTQNQSGSAQDKALLFSRGSPAGMSVQPKNWLPGPCYRQQRVSKTKTDNNNSNFTWTGASKYNLNGRESIINPGTAMASHKDDKDKFFPMSGVMIFGKESAGASNTALDNVMITDEEEIKATNPVATERFGTVAVNFQSSSTDPATGDVHVMGALPGMVWQDRDVYLQGPIWAKIPHTDGHFHPSPLMGGFGLKHPPPQILIKNTPVPANPPAEFSATKFASFITQYSTGQVSVEIEWELQKENSKRWNPEVQYTSNYAKSANVDFTVDNNGLYTEPRPIGTRYLTRP

SEQ ID NO: 175 - protein, 740 aa, Adeno-associated virus 2
MAADGYLPDWLEDTLSEGIRQWWKLKPGPPPPKPAERHKDDSRGLVLPGYKYLGPFNGLDKGEPVNAADAAALEHDKAYDRQLDSGDNPYLKYNHADAEFQERLKEDTSFGGNLGRAVFQAKKRVLEPLGLVEEPVKTAPGKKRPVEHSPVEPDSSSGTGKAGQQPARKRLNFGQTGDADSVPDPQPLGQPPAAPSGLGTNTMATGSGAPMADNNEGADGVGNSSGNWHCDSTWMGDRVITTSTRTWALPTYNNHLYKQISSQSGASNDNHYFGYSTPWGYFDFNRFHCHFSPRDWQRLINNNWGFRPKRLNFKLFNIQVKEVTQNDGTTTIANNLTSTVQVFTDSEYQLPYVLGSAHQGCLPPFPADVFMVPQYGYLTLNNGSQAVGRSSFYCLEYFPSQMLRTGNNFTFSYTFEDVPFHSSYAHSQSLDRLMNPLIDQYLYYLSRTNTPSGTTTQSGLQFSQAGASDIRDQSRNWLPGPCYRQQRVSKTSADNNNSEYSWTGATKYHLNGRDSLVNPGPAMASHKDDEEKFFPQSGVLIFGKQGSEKTNVDIEKVMITDEEEIRTTNPVATEQYGSVSTNLQRGNRQAATADVNTQGVLPGMVWQDRDVYLQGPIWAKIPHTDGHFHPSPLMGGFGLKHPPPQILIKNTPVPANPSTTFSAAKFASFITQYSTGQVSVEIEWELQKENSKRWNPEIQYTSNYNKSVNVDFTVDTNGVYSEPRPIGTRYLTRNLLLAAA

SEQ ID NO: 176 - protein, 734 aa, Adeno-associated virus 2
MAADGYLPDWLEDTLSEGIRQWWKLKPGPPPPKPAERHKDDSRGLVLPGYKYLGPFNGLDKGEPVNEADAAALEHDKAYDRQLDSGDNPYLKYNHADAEFQERLKEDTSFGGNLGRAVFQAKKRVLEPLGLVEEPVKTAPGKKRPVEHSPVEPDSSSGTGKAGQQPARKRLNFGQTGDADSVPDPQPLGQPPAAPSGLGTNTMATGSGAPMADNNEGADGVGNSSGNWHCDSTWMGDRVITTSTRTWALPTYNNHLYKQISSQSGASNDNHYFGYSTPWGYFDFNRFHCHFSPRDWQRLINNNWGFRPKRLNFKLFNIQVKEVTQNDGTTTIANNLTSTVQVFTDSEYQLPYVLGSAHQGCLPPFPADVFMVPQYGYLTLNNGSQAVGRSSFYCLEYFPSQMLRTGNNFTFSYTFEDVPFHSSYAHSQSLDRLMNPLIDQYLYYLSRTNTPSGTTTQSGLQFSQAGASDIRDQSRNWLPGPCYRQQRVSKTSADNNNSEYSWTGATMYHLNGRDSLVNPGPAMASHKDDEEKFFPQSGVLIFGKQGSEKTNVDIEKVMITDEEEIRTTNPVATEQYGSVSTNLQRGNRQAATADVNTQGVLPGMVWQDRDVYLQGPIWAKIPHTDGHFHPSPLMGGFGLKHPPPQILIKNTPVPANPSTTFSAAKFASFITQYSTGQVSVEIEWELQKENSKRWNPEIQYTSNYNKSINVDFTVDTNGVYSEPRPIGTRYLTRN

SEQ ID NO: 177 - protein, 734 aa, Adeno-associated virus 2
MAADGYLPDWLEDTLSEGIRQWWKLKPGPPPPKPAERHKDDSRGLVLPGYKYLGPFNGLDKGEPVNEADAAALEHDKAYDRQLDSGDNPYLKYNHADAEFQERLKEDTSFGGNLGRAVFQAKKRVLEPLGLVEEPVKTAPGKKRPVEHSPVEPDSSSGTGKAGQQPARKRLNFGQTGDADSVPDPQPLGQPPAAPSGLGTNTMATGSGAPMADNNEGADGVGNSSGNWHCDSTWMGDRVITTSTRTWALPTYNNHLYKQISSQSGASNDNHYFGYSTPWGYFDFNRFHCHFSPRDWQRLINNNWGFRPKRLNFKLFNIQVKEVTQNDGTTTIANNLTSTVQVFTDSEYQLPYVLGSAHQGCLPPFPADVFMVPQYGYLTLNNGSQAVGRSSFYCLEYFPSQMLRTGNNFTFSYTFEDVPFHSSYAHSQSLDRLMNPLIDQYLYYLSRTNTPSGTTTQSGLQFSQAGASDIRDQSRNWLPGPCYRQQRVSKTSADNNNSEYSWTGATKYHLNGRDSLVNPGPAMASHKDDEEKFFPQSGVLIFGKQGSEKTNVDIEKVMITDEEEIRTTNPVATEQYGSVSTNLQRGNRQAATADVNTQGVLPGMVWQDRDVYLQGPIWAKIPHTDGHFHPSPLMGGFGLKHPPPQILIKNTPVPANPSTTFSEAKFASFITQYSTGQVSVEIEWELQKENSKRWNPEIQYTSNYNKSVNVDFTVDTNGVYSEPRPIGTRYLTRN

SEQ ID NO: 178 - protein, 739 aa, Adeno-associated virus 2
MAADGYLPDWLEDTLSEGIRQWWKLKPGPPPPKPAERHKDDSRGLVLPGYKYLGPFNGLDKGEPVNEADAAALEHDKAYDRQLDSGDNPYLKYNHADAEFQERLKEDTSFGGNLGRAVFQAKKRVLEPLGLVEEPVKTAPGKKRPVEHSPVEPDSSSGTGKAGQQPARKRLNFGQTGDADSVPDPQPLGQPPAAPSGLGTNTMATGSGAPMADNNEGADGVGNSSGNWHCDSTWMGDRVITTSTRTWALPTYNNHLYKQISSQSGASNDNHYFGYSTPWGYFDFNRFHCHFSPRDWQRLINNNWGFRPKRLNFKLFNIQVKEVTQNDGTTTIANNLTSTVQVFTDSEYQLPYVLGSAHQGCLPPFPADVFMVPQYGYLTLNNGSQAVGRSSFYCLEYFPSQMLRTGNNFTFSYTFEDVPFHSSYAHSQSLDRLMNPLIDQYLYYLSRTNTPSGTTTQSGLQFSQAGASDIRDQSRNWLPGPCYRQQRVSKTSADNNNSEYSWTGATKYHLNGRDSLVNPGPAMASHKDDEEKFFPQSGVLIFGKQGSEKTNVDIEKVMITDEEEIRTTNPVATEQYGSVSTNLQRGNRQAATADVNTQGVLPGMVWQDRDVYLQGPIWAKIPHTDGHFHPSPLMGGFGLKHPPPQILIKNTPVPANPSTTFSAAKFASFITQYSTGQVSVEIEWELQKENSKRWNPEIQYTSNYNKSVNVDFTVDTNGVYSEPRPIGTRYLTRNLLLAA

SEQ ID NO: 179 - protein, 725 aa, Adeno-associated virus 2
MAADGYLPDWLEDTLSEGIRQWWKLKPGPPPPKPAERHKDDSRGLVLPGYKYLGPFNGLDKGEPVNEADAAALEHDKAYDRQLDSGDNPYLKYNHADAEFQERLKEDTSFGGNLGRAVFQAKKRVLEPLGLVEEPVKTAPGKKRPVEHSPVEPDSSSGTGKAGQQPARKRLNFGQTGDADSVPDPQPLGQPPAAPSGLGTNTMATGSGAPMADNNEGADGVGNSSGNWHCDSTWMGDRVITTSTRTWALPTYNNHLYKQISSQSGASNDNHYFGYSTPWGYFDFNRFHCHFSPRDWQRLINNNWGFRPKRLNFKLFNIQVKEVTQNDGTTTIANNLTSTVQVFTDSEYQLPYVLGSAHQGCLPPFPADVFMVPQYGYLTLNNGSQAVGRSSFYCLEYFPSQMLRTGNNFTFSYTFEDVPFHSSYAHSQSLDRLMNPLIDQYLYYLSRTNTPSGTTTQSGLQFSQAGASDIRDQSRNWLPGPCYRQQRVSKTSADNNNSEYSWTGATKYHLNGRDSLVNPGPAMASHKDDEEKFFPQSGVLIFGKQGSEKTNVDIEKVMITDEEEIRTTNPVATEQYGSVSTNLQRGNRQAATADVNTQGVLPGMVWQDRDVYLQGPIWAKIPHTDGHFHPSPLMGGFGLKHPPPQILIKNTPVPANPSTTFSAAKFASFITQYSTGQVSVEIEWELQKENSKRWNPEIQYTSNYNKSVNVDFTVDTNGVYSEPRP

SEQ ID NO: 180 - protein, 707 aa, Adeno-associated virus 2
MAADGYLPDWLEDTLSEGIRQWWKLKPGPPPPKPAERHKDDSRGLVLPGYKYLGPFNGLDKGEPVNEADAAALEHDKAYDRQLDSGDNPYLKYNHADAEFQERLKEDTSFGGNLGRAVFQAKKRVLEPLGLVEEPVKTAPGKKRPVEHSPVEPDSSSGTGKAGQQPARKRLNFGQTGDADSVPDPQPLGQPPAAPSGLGTNTMATGSGAPMADNNEGADGVGNSSGNWHCDSTWMGDRVITTSTRTWALPTYNNHLYKQISSQSGASNDNHYFGYSTPWGYFDFNRFHCHFSPRDWQRLINNNWGFRPKRLNFKLFNIQVKEVTQNDGTTTIANNLTSTVQVFTDSEYQLPYVLGSAHQGCLPPFPADVFMVPQYGYLTLNNGSQAVGRSSFYCLEYFPSQMLRTGNNFTFSYTFEDVPFHSSYAHSQSLDRLMNPLIDQYLYYLSRTNTPSGTTTQSGLQFSQAGASDIRDQSRNWLPGPCYRQQRVSKTSADNNNSEYSWTGATKYHLNGRDSLVNPGPAMASHKDDEEKFFPQSGVLIFGKQGSEKTNVDIEKVMITDEEEIRTTNPVATEQYGSCIYQPPERQQTSSYRRCQHTRRSSRHGLAGQRCVPSGAHLGKDSTHGRTFSPLSPHGWIRTTPSSTDSHQEHPGTCESFDHLQCGKVCFLHHTVLHGTGQRGDRVRAAEGKQQTLESRNSVHFQLQQVC

SEQ ID NO: 181 - protein, 739 aa, Adeno-associated virus 2; identical to SEQ ID NO: 178

SEQ ID NO: 182 - protein, 737 aa, Adeno-associated virus 2
MASDGYLPDWLEDNLSEGIREWWDLKPGAPKPKANQQKQDDGRGLVLPGYKYLGPFNGLDKGEPVNAADAAALEHDKAYDQQLKAGDNPYLRYNHADAEFQERLQEDTSFGGNLGRAVFQAKKRVLEPFGLVEEGAKTAPGKKRPVEQSPQEPDSSSGIGKTGQQPAKKRLNFGQTGDSESVPDPQPLGEPPATPAAVGPTTMASGGGAPMADNNEGADGVGNASGNWHCDSTWLGDRVITTSTRTWALPTYNNHLYKQISSASTGASNDNHYFGYSTPWGYFDFNRFHCHFSPRDWQRLINNNWGFRPKRLNFKLFNIQVKEVTTNDGTTTIANNLTSTVQVFTDSEYQLPYVLGSAHQGCLPPFPADVFMVPQYGYLTLNNGSQAVGRSSFYCLEYFPSQMLRTGNNFTFSYTFEDVPFHSSYAHSQSLDRLMNPLIDQYLYYLSRTNTPSGTTTQSGLQFSQAGASDIRDQSRNWLPGPCYRQQRVSKTSADNNNSEYSWTGATKYHLNGRDSLVNPGPAMASHKDDEEKFFPQSGVLIFGKQGSEKTNVDIEKVMITDEEEIRTTNPVATEQYGSVSTNLQRGNRQAATADVNTQGVLPGMVWQDRDVYLQGPIWAKIPHTDGHFHPSPLMGGFGLKHHPPQILIKNTPVPANPSTTFSAAKFASFITQYSTGQVSVEIEWELQKENSKRWNPEIQYTSNYNKSVNVDFTVDTNGVYSEPRPIGTRYLTRNLL

SEQ ID NO: 183 - protein, 741 aa, Adeno-associated virus 2
MAADGYLPDWLEDTLSEGIREWWALKPGAPKPKANQQKQDDGRGLVLPGYKYLGPFNGLDKGEPVNEADAAALEHDKAYDQQLQAGDNPYLRYNHADAEFQERLQEDTSFGGNLGRAVFQAKKRVLEPLGLVEEPVKTAPGKKRPVEHSPVEPDSSSGTGKSGQQPARKRLNFGQTGDADSVPDPQPLGQPPAAPSGLGTNTMATGSGAPMADNNEGADGVGNSSGNWHCDSTWMGDRVITTSTRTWALPTYNNHLYKQISSQSGASNDNHYFGYSTPWGYFDFNRFHCHFSPRDWQRLINNNWGFRPKRLNFKLFNIQVKEVTQNDGTTTIANNLTSTVQVFTDSEYQLPYVLGSAHQGCLPPFPADVFMVPQYGYLTLNNGSQAVGRSSFYCLEYFPSQMLRTGNNFTFSYTFEDVPFHSSYAHSQSLDRLMNPLIDQYLYYLSRTNTPSGTTTQSGLQFSQAGASDIRDQSRNWLPGPCYRQQRVSKTSADNNNSEYSWTGATKYHLNGRDSLVNPGPAMASHKDDEEKFFPQSGVLIFGKQGSEKTNVDIEKVMITDEEEIRTTNPVATEQYGSVSTNLQRGNLANHNNTTNARQAATADVNTQGVLPGMVWQDRDVYLQGPIWAKIPHTDGHFHPSPLMGGFGLKHPPPQILIKNTPVPANPSTTFSAAKFASFITQYSTGQVSVEIEWELQKENSKRWNPEIQYTSNYNKSINVDFTVDTNGVYSEPRPIGTRYL

SEQ ID NO: 184 - protein, 730 aa, Adeno-associated virus 2
MASDGYLPDWLEDNLSEGIREWWDLKPGAPKPKANQQKQDDGRGLVLPGYKYLGPFNGLDKGEPVNAADAAALEHDKAYDQQLKAGDNPYLRYNHADAEFQERLQEDTSFGGNLGRAVFQAKKRVLEPFGLVEEGAKTAPGKKRPVEQSPQEPDSSSGIGKTGQQPAKKRLNFGQTGDSESVPDPQPLGEPPATPAAVGPTTMASGGGAPMADNNEGADGVGNASGNWHCDSTWLGDRVITTSTRTWALPTYNNHLYKQISSASTGASNDNHYFGYSTPWGYFDFNRFHCHFSPRDWQRLINNNWGFRPKRLNFKLFNIQVKEVTTNDGVTTIANNLTSTVQVFSDSEYQLPYVLGSAHQGCLPPFPADVFMIPQYGYLTLNNGSQAVGRSSFYCLEYFPSQMLRTGNNFTFSYTFEDVPFHSSYAHSQSLDRLMNPLIDQYLYYLNRTQNQSGSAQNNDLLFSRGSPAGMSVQPKNWLPGPCYRQQRVSKTKTDNNNSNFTWTGASKYNLNGRESIINPGTAMASHKDDKDKFFPMSGVMIFGKESAGASNTALDNVMITDEEEIKATNPVATERFGTVAVNLQSSSTDPATGDVHVMGALPGMVWQDRDVYLQGPIWAKIPHTDGHFHPSPLMGGFGLKNPPPQILIKNTPVPANPPAEFSATKFASFITQYSTGQVSVEIEWELQKENSKRWNPEVQYTSNYAKSANVDFTVDNNGLYTEPRPIGTR

SEQ ID NO: 185 - protein, 735 aa, Adeno-associated virus 2
  MOD_RES (239)..(239): Any amino acid
MASDGYLPDWLEDNLSEGIREWWDLKPGAPKPKANQQKQDDGRGLVLPGYKYLGPFNGLDKGEPVNAADAAALEHDKAYDQQLKAGDNPYLRYNHADAEFQERLQEDTSFGGNLGRAVFQAKKRVLEPFGLVEEGAKTAPGKKRPVEQSPQEPDSSSGIGKTGQQPAKKRLNFGQTGDSESVPDPQPLGEPPATPAAVGPTTMASGGGAPMADNNEGADGVGNASGNWHCDSTWLGDRXITTSTRTWALPTYNNHLYKQISSASTGASNDNHYFGYSTPWGYFDFNRFHCHFSPRDWQRLINNNWGFRPKRLNFKLFNIQVKEVTTNDGVTTIANNLTSTVQVFSDSEYQLPYVLGSAHQGCLPPFPADVFMIPQYGYLTLNNGSQAVGRSSFYCLEYFPSQMLRTGNNFTFSYTFEDVPFHSSYAHSQSLDRLMNPLIDQYLYYLNRTQNQSGSAQNNDLLFSRGSPAGMSVQPKNWLPGPCYRQQRVSKTKTDNNNSNFTWTGASKYNLNGRESIINPGTAMASHKDDKDKFFPMSGVMIFGKESAGASNTALDNVMITDEEEIKATNPVATERFGTVAVNLQSSSTDPATGDVHVMGALPGMVWQDRDVYLQGPIWAKIPHTDGHFHPSPLMGGFGLKNPPPQILIKNTPVPANPPAEFSATKFASFITQYSTGQVSVEIEWELQKENSKRWNPEVQYTSNYAKSANVDFTVDNNGLYTEPRPIGTRYLTRP

SEQ ID NO: 186 - protein, 733 aa, Adeno-associated virus 2
MASDGYLPDWLEDNLSEGIREWWDLKPGAPKPKANQQKQDDGRGLVLPGYKYLGPFNGLDKGEPVNAADAAALEHDKAYDQQLKAGDNPYLRYNHADAEFQERLQEDTSFGGNLGRAVFLAKKRVLEPFGLVEEGAKTAPGKKRPVEQSPQEPDSSSGIGKTGQQPAKKRLNFGQTGDSESVPDPQPLGEPPATPAAVGPTTMASGGGAPMADNNEGADGVGNASGNWHCDSTWLGDRVITTSTRTWALPTYNNHLYKQISSASTGASNDNHYFGYSTPWGYFDFNRFHCHFSPRDWQRLINNNWGFRPKRLNFKLFNIQVKEVTTNDGVTTIANNLTSTVQVFSDSEYQLPYVLGSAHQGCLPPFPADVFMIPQYGYLTLNNGSQAVGRSSFYCLEYFPSQMLRTGNNFTFSYTFEDVPFHSSYAHSQSLDRLMNPLIDQYLYYLNRTQNQSGSAQNNDLLFSRGSPAGMSVQPKNWLPGPCYRQQRVSKTKTDNNNSNFTWTGASKYNLNGRESIINPGTAMASHKDDKDKFFPMSGVMIFGKESAGASNTALDNVMITDEEEIKATNPVATERFGTVAVNLQSSSTDPATGDVHVMGALPGMVWQDRDVYLQGPIWAKIPHTDGHFHPSPLMGGFGLKNPPPQILIKNTPVPANPPAEFSATKFASFITQYSTGQVSVEIEWELQKENSKRWNPEVQYTSNYAKSANVDFTVDNNGLYTEPRPIGTRYLT

SEQ ID NO: 187 - protein, 734 aa, Adeno-associated virus 2
MAADGYLPDWLEDTLSEGIRQWWKLKPGPPPPKPAERHKDDSRGLVLPGCKYLGPFNGLDKGEPVNEADAAALEHDKAYDRQLDSGDNPYLKYNHADAEFQERLKEDTSFGGNLGRAVFQAKKRVLEPLGLVEEPVKTAPGKKRPVEHSPVEPDSSSGTGKAGQQPARKRLNFGQTGDADSVPDPQPLGQPPAAPSGLGTNTMATGSGAPMADNNEGADGVGNSSGNWHCDSTWMGDRVITTSTRTWALPTYNNHLYKQISSQSGASNDNHYFGYSTPWGYFDFNRFHCHFSPRDWQRLINNNWGFRPKRLNFKLFNIQVKEVTQNDGTTTIANNLTSTVQVFSDSEYQLPYVLGSAHQGCLPPFPADVFMIPQYGYLTLNNGSQAVGRSSFYCLEYFPSQMLRTGNNFTFNYTFEDVPFHSSYAHSQSLDRLMNPLIDQYLYYLNRTQNQSGSAQNNDLLFSRGSPAGMSVQPKNWLPGPCYRQQRVSKTKTDNNNSNFTWTGASKYNLNGRESIINPGTAMASHKDDKDKFFPMSGVMIFGKESAGASNTALDNVMITDEEEIKATNPVATERFGTVAVNLQSSSTDPATGDVHVMGALPGMVWQDRDVYLQGPIWAKIPHTDGHFHPSPLMGGFGLKNPPPQILIKNTPVPANPPAEFSATKFASFITQYSTGQVSVEIEWELQKENSKRWNPEVQYTSNYAKSANVDFTVDNNGLYTEPRPIGTRYLTRP

SEQ ID NO: 188 - protein, 734 aa, Adeno-associated virus 2
MAADGYLPDWLEDTLSEGIRQWWKLKPGPPPPKPAERHKDDSRGLVLPGYKYLGPFNGLDKGEPVNEADAAALEHDKAYDRQLDSGDNPYLKYNHADAEFQERLKEDTSFGGNLGRAVFQAKKRVLEPLGLVEEPVKTAPGKKRPVEHSPVEPDSSSGTGKAGQQPARKRLNFGQTGDADSVPDPQPLGQPPAAPSGLGTNTMATGSGAPMADNNEGADGVGNSSGNWHCDSTWMGDRVITTSTRTWALSTYNNHLYKQISSQSGASNDNHYFGYSTPWGYFDFNRFHCHFSPRDWQRLINNNWGFRPKRLNFKLFNIQVKEVTQNDGTTTIANNLTSTVQVFTDSEYQLPYVLGSAHQGCLPPFPADVFMVPQYGYLTLNNGSQAVGRSSFYCLEYFPSQMLRTGNNFTFSYTFEDVPFHSSYAHSQSLDRLMNPLIDQYLYYLSRTNTPSGTTTQSRLQFSQAGASDIRDQSRNWLPGPCYRQQRVSKTSADNNNSEYSWTGATKYHLNGRDSLVNPGPAMASHKDDEEKFFPQSGVLIFGKQGSEKTNVDIEKVMITDEEEIRTTNPVATEQYGSVSTNLQRGNRQAATADVNTQGVLPGMVWQDRDVYLQGPIWAKIPHTDGHFHPSPLMGGFGLKHPPPQILIKNTPVPANPSTTFSAAKFASFITQYSTGQVSVEIEWELQKENSKRWNPEIQYTSNYNKSINVDFTVDTNGVYSEPRPIGTRYLTRN

SEQ ID NO: 189 - protein, 738 aa, Adeno-associated virus 2
MAADGYLPDWLEDTLSEGIRQWWKLKPGPPPPKPAERHKDDSRGLVLPGYKYLGPFNGLDKGEPVNEADAAALEHDKAYDRQLDGGDNPYLKYNHADAEFQERLKEDTSFGGNLGRAVFQAKKRVLEPLGLVEEPVKTAPGKKRPVEHSPVEPDSSSGTGKAGQQPARKRLNFGQTGDADSVPDPQPLGQPPAAPSGLGTNTMATGSGAPMADNNEGADGVGNSSGNWHCDSTWMGDRVITTSTRTWALPTYNNHLYKQISSQSGASNDNHYFGYSTPWGYFDFNRFHCHFSPRDWQRLINNNWGFRPKRLNFKLFNIQVKEVTQNDGTTTIANNLTSTVQVFTDSEYQLPYVLGSAHQGCLPPFPADVFMVPQYGYLTLNNGSQAVGRSSFYCLEYFPSQMLRTGNNFTFSYTFEDVPFHSSYAHSQSLDRLMNPLIDQYLYYLSRTNTPSGTTTQSGLQFSQAGASDIRDQSRNWLPGPCYRQQRVSKTSADNNNSEYSWTGATKYHLNGRDSLVNPGPAMASHKDDEEKFFPQSGVLIFGKQGSEKTNVDIEKVMITDEEEIRTTNPVATEQYGSVSTNLQRGNRQAATADVNTQGVLPGMVWQDRDVYLQGPIWAKIPHTDGHFHPSPLMGGFGLKHPPPQILIKNTPVPANPSTTFSAAKFASFITQYSTGQVSVEIEWELQKENSKRWNPEIQYTSNYNKSVNVDFTVDTNGVYSEPRPIGTRYLTRNLLRP

SEQ ID NO: 190 - DNA, 2208 bp, Artificial Sequence
  source: /note="Description of Artificial Sequence: Synthetic polynucleotide"
atggctgccgatggttatcttccagattggctcgaggacactctctctgaaggaataagacagtggtggaagctcaaacctggcccaccaccaccaaagcccgcagagcggcataaggacgacagcaggggtcttgtgcttcctgggtacaagtacctcggacccttcaacggactcgacaagggggagccggtcaacgaggcagacgccgcggccctcgagcacgacaaggcctacgaccggcagctcgacagcggagacaacccgtacctcaagtacaaccacgccgacgcagagtttcaggagcgccttaaagaagatacgtcttttgggggcaacctcggacgagcagtcttccaggcgaaaaagagggttcttgaacctctgggcctggttgaggaacctgttaagacggctccgggaaaaaagaggccggtagagcactctcctgtggagccagactcctcctcgggaaccggaaaagcgggccagcagcctgcaagaaaaagattaaattttggtcagactggagacgcagactccgtacctgacccccagcctctcggacagccaccagcagccccctctggtctgggatctactacaatggctacaggcagtggcgcaccaatggcagacaataacgagggtgccgatggagtgggtaattcctcaggaaattggcattgcgattcccaatggctgggcgacagagtcatcaccaccagcacccgaacctgggccctgcccacatacaacaaccacctctacaagcaaatctccagccaatcaggagccagcaacgacaaccactactttggctacagcaccccctgggggtattttgacttcaacagattccactgccacttttcaccacgtgactggcaaagactcatcaacaacaactggggattccggcccaaaagactcaacttcaagctctttaatattcaagtcaaagaggtcacgcagaatggcggtacgacgacgattgccaataaccttaccagcacggttcaggtgtttactgactcggagtaccagctcccgtacgtcctgggctcggcgcatcaaggatgcctcccgccgtttccagcggacgtcttcatggtcccacagtatggatacctcaccctgaacaacgggagtcaggcggtaggacgctcttccttttactgcctggagtactttccttctcagatgctgcgtactggaaacaactttcagttcagctacacttttgaagacgtgcctttccacagcagctacgctcacagccagagtctggatcggctgatgaatcctctgatcgaccagtacctgtattatctgaacaagacacaaacaaatagtggaactcttcagcagtctcggctactgtttagccaagctggaccaaccaacatgtctcttcaagctaaaaactggctgcctggaccttgctacagacagcagcgtctgtcaaaacaggcaaacggcaacaacaacagcaactttccctggactgcagctacaaagtatcatctaaatggccgggactcgttggttaatccaggaccagctatggccagtcacaaggatgacgaagaaaagtttttccccatgcatggaaccctgatatttggtaaacaaggaacaaatgccaacgacgcggatttggaaaatgtcatgattacagatgaagaagaaatcagggccaccaatcccgtggctacggagcagtacgggactgtgtcaaataatttgcaaaactcaaacactggtccaactactggaactgtcaatcaccaaggagcgttacctggtatggtgtggcaggatcgagacgtgtacctgcagggacccatttgggccaagattcctcacaccgatggacactttcatccttctccactgacgggaggttttggactcaaacacccgcctcctcagatcatgatcaaaaacactcccgttccagccaatcctcccacaaacttcagttctgccaagtttgcttctttcatcacacagtattccacgggacaggtcagcgtggagatcgagtgggagctgcagaaggagaacagcaaacgctggaatcccgaaattcagtacacttccaactacaacaagtctgttaatgtggactttactgtggacactaatggtgtgtattcagagcctcgccccattggcaccagatacctgactcgtaatctgtaa

SEQ ID NO: 191 - protein, 735 aa, Artificial Sequence
  source: /note="Description of Artificial Sequence: Synthetic polypeptide"
MAADGYLPDWLEDTLSEGIRQWWKLKPGPPPPKPAERHKDDSRGLVLPGYKYLGPFNGLDKGEPVNEADAAALEHDKAYDRQLDSGDNPYLKYNHADAEFQERLKEDTSFGGNLGRAVFQAKKRVLEPLGLVEEPVKTAPGKKRPVEHSPVEPDSSSGTGKAGQQPARKRLNFGQTGDADSVPDPQPLGQPPAAPSGLGSTTMATGSGAPMADNNEGADGVGNSSGNWHCDSQWLGDRVITTSTRTWALPTYNNHLYKQISSQSGASNDNHYFGYSTPWGYFDFNRFHCHFSPRDWQRLINNNWGFRPKRLNFKLFNIQVKEVTQNGGTTTIANNLTSTVQVFTDSEYQLPYVLGSAHQGCLPPFPADVFMVPQYGYLTLNNGSQAVGRSSFYCLEYFPSQMLRTGNNFQFSYTFEDVPFHSSYAHSQSLDRLMNPLIDQYLYYLNKTQTNSGTLQQSRLLFSQAGPTNMSLQAKNWLPGPCYRQQRLSKQANGNNNSNFPWTAATKYHLNGRDSLVNPGPAMASHKDDEEKFFPMHGTLIFGKQGTNANDADLENVMITDEEEIRATNPVATEQYGTVSNNLQNSNTGPTTGTVNHQGALPGMVWQDRDVYLQGPIWAKIPHTDGHFHPSPLTGGFGLKHPPPQIMIKNTPVPANPPTNFSSAKFASFITQYSTGQVSVEIEWELQKENSKRWNPEIQYTSNYNKSVNVDFTVDTNGVYSEPRPIGTRYLTRNL

SEQ ID NO: 192 - DNA, 2208 bp, Artificial Sequence
  source: /note="Description of Artificial Sequence: Synthetic polynucleotide"
atggctgccgatggttatcttccagattggctcgaggacactctctctgaaggaataagacagtggtggaagctcaaacctggcccaccaccaccaaagctcgcagagcggcatcaggacgacagcaggggtcttgtgcttcctgggtacaagtacctcggacccttcaacggactcgacaaaggagagccggtcaacgaggcagacgccgcggccctcgagcacgacaaggcctacgaccggcagctcgacagcggagacaacccgtacctcaagtacaaccacgccgacgcggagtttcaggagcgtcttaaagaagatacgtcttttgggggcaacctcggacgagcagtcttccaggcgaaaaagagggttcttgaacctctgggcctggttgaggaacctgttaagacggctccgggaaaaaagaggccggtagagcactctcctgtggagccagactcctcctcgggaaccggaaaggcgggccatcagcctgcgagaaagagattgaattttggtcagactggagacgcagactccgtacctgacccccagcctctcggacagccaccagcagcccccacaagtctgggatctactacaatggctacaggcagtggcgcaccaatggcagacaataacgagggtgccgatggagtgggtaattcctcaggaaattggcattgcgattcccaatggctgggcgacagagtcatcaccaccagcacccgaacctgggccctgcccacctacaacaaccacctctacaagcaaatctccagccaatcaggagcctcgaacgacaaccactactttggctacagcaccccctgggggtattttgacttcaacagattccactgtcacttctccccacgtgattggcaaagactcatcaacaacaactggggattccgacccaagagactcaacttcaagctctttaacattcaagtcaaagaggtcacgcagaatgacggtacgacgacgattgccaataaccttaccagcacggttcaggtgtttactgactcggagtaccagctcccgtacgtcctcggctcggcgcatcaaggatgcctcccgccgtttccagcggacgtcttcacggtcccacagtatggatacctcaccctgaacaacgggagtcaggcggtaggacgctcttccttttactgcctggagtactttccttctcagatgctgcgtactggaaacaaccttaccttcagctacacctttgaggacgttcctttccacagcagctacgctcacagccagagtttggaccggctgatgaatcctctgatcgaccagtatctatattatctgaacaggacacaatcaaatagtggaactcttcagcagtctaggctactgtttagccaagctggacccaccagcatgtctcttcaagctaaaaactggctgcctggaccttgctacagacagcagcgtctttcaaagcaggcaaacgacaacaacaacagcaactttccctggactgcggctacaaagtatcatctaaatggccgggactcgttggttaatccaggaccagctatggccagccacaaagacgatgaagaaaagtttttccccatgcatggaaccctgatatttggtaaacaaggaacaaatgctaacgacgcggatttggagcatgttatgattacagatgaagaagaaatcaggaccaccaatcctgtggctacagagcagtacggaaacgtgtcaaataatttgcaaaactcaaatactggtccaactacagaaaatgtcaatcaccagggagcgttacctggtatggtgtggcaggatcgagacgtgtacctgcagggacccatttgggccaagattcctcacaccgacggacactttcacccttctccactgatgggaggttttggactcaaacacccgcctcctcaaatcatgatcaaaaacactcccgttccagccaatcctcccacaaactacagttctgccaagtttgcttctttcatcacacagtattccacgggccaggtcagcgtggagattgagtgggagctgcggaaggagaacagcaaacgctggaaccccgagatccagtatacttccaactacaacaaatctgttaatgtggactttactgtggacactaatggtgtgtattcagagcctcgccccattggcaccagatacctgactcgtaatctgtaa

SEQ ID NO: 193 - protein, 735 aa, Artificial Sequence
  source: /note="Description of Artificial Sequence: Synthetic polypeptide"
MAADGYLPDWLEDTLSEGIRQWWKLKPGPPPPKLAERHQDDSRGLVLPGYKYLGPFNGLDKGEPVNEADAAALEHDKAYDRQLDSGDNPYLKYNHADAEFQERLKEDTSFGGNLGRAVFQAKKRVLEPLGLVEEPVKTAPGKKRPVEHSPVEPDSSSGTGKAGHQPARKRLNFGQTGDADSVPDPQPLGQPPAAPTSLGSTTMATGSGAPMADNNEGADGVGNSSGNWHCDSQWLGDRVITTSTRTWALPTYNNHLYKQISSQSGASNDNHYFGYSTPWGYFDFNRFHCHFSPRDWQRLINNNWGFRPKRLNFKLFNIQVKEVTQNDGTTTIANNLTSTVQVFTDSEYQLPYVLGSAHQGCLPPFPADVFTVPQYGYLTLNNGSQAVGRSSFYCLEYFPSQMLRTGNNLTFSYTFEDVPFHSSYAHSQSLDRLMNPLIDQYLYYLNRTQSNSGTLQQSRLLFSQAGPTSMSLQAKNWLPGPCYRQQRLSKQANDNNNSNFPWTAATKYHLNGRDSLVNPGPAMASHKDDEEKFFPMHGTLIFGKQGTNANDADLEHVMITDEEEIRTTNPVATEQYGNVSNNLQNSNTGPTTENVNHQGALPGMVWQDRDVYLQGPIWAKIPHTDGHFHPSPLMGGFGLKHPPPQIMIKNTPVPANPPTNYSSAKFASFITQYSTGQVSVEIEWELRKENSKRWNPEIQYTSNYNKSVNVDFTVDTNGVYSEPRPIGTRYLTRNL

SEQ ID NO: 194 - DNA, 2208 bp, Artificial Sequence
  source: /note="Description of Artificial Sequence: Synthetic polynucleotide"
atggctgccgatggttatcttccagattggctcgaggacactctctctgaaggaataagacagtggtggaagctcaaacctggcccaccaccaccaaagcccgcagagcggcatcaggacgacagcaggggtcttgtgcttcctgggtacaagtacctcggacccttcaacggactcgacaaaggagagccggtcaacgaggcagacgccgcggccctcgagcacgacaaggcctacgaccggcagctcgacagcggagacaacccgtacctcaagtacaaccacgccgacgcggagtttcaggagcgtcttaaagaagatacgtcttttgggggcaacctcggacgagcagtcttccaggcgaaaaagagggttcttgaacctctgggcctggttgaggaacctgttaagacggctccgggaaaaaagaggccggtagagcactctcctgtggagccagactcctcctcgggaaccggaaaagcgggccatcagcctgcgagaaagagattgaattttggtcagactggagacgcagactccgtacctgacccccagcctctcggacagccaccagcagcccccacaagtttgggatctactacaatggctacaggcagtggcgcaccaatggcagacaataacgagggtgccgatggagtgggtaattcctcaggaaattggcattgcgattcccaatggctgggcgacagagtcatcaccaccagcacccgaacctgggccctgcccacctacaacaaccacctctacaagcaaatctccagccaatcaggagcctcgaacgacaaccactactttggctacagcaccccctgggggtattttgacttcaacagattccactgtcacttctccccacgtgattggcaaagactcatcaacaacaactggggattccgacccaagagactcaacttcaagctctttaacattcaagtcaaggaggtcacgcagaatgacggtacgacgacgattgccaataaccttaccagcacggttcaggtgtttactgactcggagtaccagctcccgtacgtcctcggctcggcgcatcaaggatgcctcccgccgtttccagcggacgtcttcatggtcccacagtatggatacctcaccctgaacaacgggagtcaggcggtaggacgctcttccttttactgcctggagtactttccttctcagatgctgcgtactggaaacaactttaccttcagctacacctttgaggacgttcctttccacagcagctacgctcacagccagagtttggaccggctgatgaatcctctgatcgaccagtatctatattatctgaacaggacacaatcaaatagtggaactcttcagcagtctaggctactgtttagccaagctggacccaccagcatgtctcttcaagctaaaaactggctgcctggaccttgctacagacagcagcgtctttcaaagcaggcaaacgacaacaacaacagcaactttccctggactgcggctacaaagtatcgtctaaatggccgggactcgttggttaatccaggaccagctatggccagccacaaagacgatgaagaaaagtttttccccatgcatggaaccctgatatttggtaaacaaggaacaaatgctaacgacgcggatttggagcatgttatgattacagatgaagaagaaatcaggaccaccaatcctgtggctacagagcagtacggaaacgtgtcaaataatttgcaaaactcaaatactggtccaactacagaaaatgtcaatcaccagggagcgttacctggtatggtgtggcaggatcgagacgtgtacctgcagggacccatttgggccaagattcctcacaccgacggacactttcacccttctccactgatgggaggttttggactcaaacacccgcctcctcaaatcatgatcaaaaacactcccgttccagccaatcctcccacaaacttcagttctgccaagtttgcttctttcatcacacagtattccacgggccaggtcagcgtggagattgagtgggagctgcagaaggagaacagcaaacgctggaaccccgagatccagtatacttccaactacaacaaatctgttaatgtggactttactgtggacactaatggtgtgtattcagagcctcgccccattggcaccagatacctgactcgtaatctgtaa

SEQ ID NO: 195 - protein, 735 aa, Artificial Sequence
  source: /note="Description of Artificial Sequence: Synthetic polypeptide"
MAADGYLPDWLEDTLSEGIRQWWKLKPGPPPPKPAERHQDDSRGLVLPGYKYLGPFNGLDKGEPVNEADAAALEHDKAYDRQLDSGDNPYLKYNHADAEFQERLKEDTSFGGNLGRAVFQAKKRVLEPLGLVEEPVKTAPGKKRPVEHSPVEPDSSSGTGKAGHQPARKRLNFGQTGDADSVPDPQPLGQPPAAPTSLGSTTMATGSGAPMADNNEGADGVGNSSGNWHCDSQWLGDRVITTSTRTWALPTYNNHLYKQISSQSGASNDNHYFGYSTPWGYFDFNRFHCHFSPRDWQRLINNNWGFRPKRLNFKLFNIQVKEVTQNDGTTTIANNLTSTVQVFTDSEYQLPYVLGSAHQGCLPPFPADVFMVPQYGYLTLNNGSQAVGRSSFYCLEYFPSQMLRTGNNFTFSYTFEDVPFHSSYAHSQSLDRLMNPLIDQYLYYLNRTQSNSGTLQQSRLLFSQAGPTSMSLQAKNWLPGPCYRQQRLSKQANDNNNSNFPWTAATKYRLNGRDSLVNPGPAMASHKDDEEKFFPMHGTLIFGKQGTNANDADLEHVMITDEEEIRTTNPVATEQYGNVSNNLQNSNTGPTTENVNHQGALPGMVWQDRDVYLQGPIWAKIPHTDGHFHPSPLMGGFGLKHPPPQIMIKNTPVPANPPTNFSSAKFASFITQYSTGQVSVEIEWELQKENSKRWNPEIQYTSNYNKSVNVDFTVDTNGVYSEPRPIGTRYLTRNL

SEQ ID NO: 196 - DNA, 2208 bp, Artificial Sequence
  source: /note="Description of Artificial Sequence: Synthetic polynucleotide"
atggctgccgatggttatcttccagattggctcgaggacactctctctgaaggaataagacagtggtggaagctcaaacctggcccaccaccaccaaagcccgcagagcggcatcaggacgacagcaggggtcttgtgcttcctgggtacaagtacctcggacccttcaacggactcgacaaaggagagccggtcaacgaggcagacgccgcggccctcgagcacgacaaggcctacgaccggcagctcgacagcggagacaacccgtacctcaagtacaaccacgccgacgcggagtttcaggagcgtcttaaagaagatacgtcttttgggggcaacctcggacgagcagtcttccaggcgaaaaagagggttcttgaacctctgggcctggttgaggaacctgttaagacggctccgggaaaaaagaggccggtagagcactctcctgtggagccagactcctcctcgggaaccggaaaagcgggccatcagcctgcgagaaagagattgaattttggtcagactggagacgcagactccgtacctgacccccagcctctcggacagccaccagcagcccccacaagtttgggatctactacaatggctacaggcagtggcgcaccaatggcagacaataacgagggtgccgatggagtgggtaattcctcaggaaattggcattgcgattcccaatggctgggcgacagagtcatcaccaccagcacccgaacctgggccctgcccacctacaacaaccacctctacaagcaaatctccagccaatcaggagcctcgaacgacaaccactactttggctacagcaccccctgggggtattttgacttcaacagattccactgtcacttctccccacgtgattggcaaagactcatcaacaacaactggggattccgacccaagagactcaacttcaagctctttaacattcaagtcaaagaggtcacgcagaatgacggtacgacgacgattgccaataaccttaccagcacggttcaggtgtttactgactcggagtaccagctcccgtacgtcctcggctcggcgcatcaaggatgcctcccgccgtttccagcggacgtcttcatggtcccacagtatggatacctcaccctgaacaacgggagtcaggcggtaggacgcccttccttttactgcctggagtactttccttctcagatgctgcgtactggaaacaactttaccttcagctacacctttgaggacgttcctttccacagcagctacgctcacagccagagtttggaccggctgatgaatcctctgatcgaccagtatctatattatctgaacaggacacaatcaaatagtggaactcttcagcagtctaggctactgtttagccaagctggacccaccagcatgtctcttcaagctaaaaactggctgcctggaccttgctacagacagcagcgtctttcaaagcaggcaaacgacaacaacaacagcaactttccctggactgcggctacaaagtatcatctaaatggccgggactcgttggttaatccaggaccagctatggccagccacaaagacgatgaagaaaagtttttccccatgcatgggaccctgatatttggtaaacaaggaacaaatgctaacgacgcggatttggagcatgttatgattacagatgaagaagaaatcaggaccaccaatcctgtggctacagagcagtacggaaacgtgtcaaataatttgcaaaactcaaatactggtccaactacagaaaatgtcaatcaccagggagcgttacctggtatggtgtggcaggatcgagacgtgtacctgcagggacccatttgggccaagattcctcacaccgacggacactttcacccttctccactgatgggaggttttggactcaaacacccgcctcctcaaatcatgatcaaaaacactcccgttccagccaatcctcccacaaacttcagttctgccaagtttgcttctttcatcacacagtattccacgggccaggtcagcgtggagattgagtgggagctgcagaaggagaacagcaaacgctggaaccccgagatccagtatacttccaactacaacaaatctgttaatgtggactttactgtggacactaatggtgtgtattcagagcctcgccccattggcaccagatacctgactcgtaatctgtaa

SEQ ID NO: 197 - protein, 735 aa, Artificial Sequence
  source: /note="Description of Artificial Sequence: Synthetic polypeptide"
MAADGYLPDWLEDTLSEGIRQWWKLKPGPPPPKPAERHQDDSRGLVLPGYKYLGPFNGLDKGEPVNEADAAALEHDKAYDRQLDSGDNPYLKYNHADAEFQERLKEDTSFGGNLGRAVFQAKKRVLEPLGLVEEPVKTAPGKKRPVEHSPVEPDSSSGTGKAGHQPARKRLNFGQTGDADSVPDPQPLGQPPAAPTSLGSTTMATGSGAPMADNNEGADGVGNSSGNWHCDSQWLGDRVITTSTRTWALPTYNNHLYKQISSQSGASNDNHYFGYSTPWGYFDFNRFHCHFSPRDWQRLINNNWGFRPKRLNFKLFNIQVKEVTQNDGTTTIANNLTSTVQVFTDSEYQLPYVLGSAHQGCLPPFPADVFMVPQYGYLTLNNGSQAVGRPSFYCLEYFPSQMLRTGNNFTFSYTFEDVPFHSSYAHSQSLDRLMNPLIDQYLYYLNRTQSNSGTLQQSRLLFSQAGPTSMSLQAKNWLPGPCYRQQRLSKQANDNNNSNFPWTAATKYHLNGRDSLVNPGPAMASHKDDEEKFFPMHGTLIFGKQGTNANDADLEHVMITDEEEIRTTNPVATEQYGNVSNNLQNSNTGPTTENVNHQGALPGMVWQDRDVYLQGPIWAKIPHTDGHFHPSPLMGGFGLKHPPPQIMIKNTPVPANPPTNFSSAKFASFITQYSTGQVSVEIEWELQKENSKRWNPEIQYTSNYNKSVNVDFTVDTNGVYSEPRPIGTRYLTRNL

SEQ ID NO: 198 - DNA, 2208 bp, Artificial Sequence
  source: /note="Description of Artificial Sequence: Synthetic polynucleotide"
atggctgccgatggttatcttccagattggctcgaggacactctctctgaaggaataagacagtggtggaagctcaaacctggcccaccaccaccaaagcccgcagagcggcataaggacgacagcaggggtcttgtgcttcctgggtacaagtacctcggacccttcaacggactcgacaagggagagccggtcaacgaggcagacgccgcggccctcgagcacgacaaggcctacgaccggcagctcgacagcggagacaacccgtacctcaagtacaaccacgccgacgcggagtttcaggagcgccttaaagaagatacgtcttttgggggcaacctcggacgagcagtcttccaggcaaaaaagagggttcttgaacctctgggcctggttgaggagcctgttaaaacggctccgggaaaaaagaggccggtagagcactctcctgcggagccagactcctcctcgggaaccggaaaagcgggccagcagcctgcaagaaaaagattgaatttcggtcagactggagacgcagactccgtacctgacccccagcctctcggacagccaccagcagccccctctggtctgggaactaatacgatggcttcaggcagtggcgcaccaatggcagacaataacgagggcgccgacggagtgggtaattcctcgggaaattggcattgcgattccacatggatgggcgacagagtcatcaccaccagcacccgaacttgggccctgcccacctacaacaaccatctctacaagcaaatctccagccaatcaggagccagcaacgacaaccactactttggctacagcaccccttgggggtattttgacttcaacagattccactgccacttttcaccacgtgactggcaaagactcatcaacaacaactggggattccggcccaagagactcaacttcaagctctttaacattcaagtcaaagaggtcacgcagaatgacggtacgacgacgattgccaataaccttaccagcacggttcaggtgtttactgactcggagtaccagctcccgtacgtcctcggctcggcgcatcaaggatgcctcccgccgttcccagcagacgtcttcatggtgccacagtatggatacctcaccctgaacaacgggagtcaggcagtaggacgctcttcattttactgcctggagtactttccttctcagatgctgcgtaccggaaacaactttaccttcagctacacctttgaggacgttcctttccacagcagctacgctcacagccagagtttggaccgtctcatgaatcctctcatcgaccagtacctgtattacttgagcagaacaaacactccaagcggaaccaccacgcagtccaggcttcagttttctcaggccggagcaagtgacattcgggaccagtctaggaactggcttcctggaccctgttaccgccagcagcgagtatcaaagacatctgcggataacaacaacagtgaatactcgtggactggagctaccaagtaccacctcaatggcagagactctctggtgaatccgggcccggccatggccagccacaaggacgatgaagaaaagttttttcctcagagcggggttctcatctttgggaagcaaggctcagagaaaacaaatgtggacattgaaaaggtcatgattacagacgaagaggaaatcaggaccaccaatcccgtggctacggagcagtatggttctgtatctaccaacctgcagggcggcaacacacaagcagctaccgcagatgtcaacacacaaggcgttcttccaggcatggtctggcaggacagagacgtgtacctgcaggggcccatctgggcaaagattccacacacggacggacattttcacccctctcccctcatgggcggattcggacttaaacaccctcctccacagattctcatcaagaacaccccggtacctgcgaatccttcgaccaccttcagtgcggcaaagtttgcttctttcatcacacagtattccacggggcaggtcagcgtggagatcgagtgggagctgcagaaggagaacagcaaacgctggaatcccgagatccagtacacttccaactacaacaaatctgttaatgtggactttactgttgacactaatggcgtgtattcagagcctcgccccattggcaccagatacctgactcgtaatctgtaa

SEQ ID NO: 199 - protein, 735 aa, Artificial Sequence
  source: /note="Description of Artificial Sequence: Synthetic polypeptide"
MAADGYLPDWLEDTLSEGIRQWWKLKPGPPPPKPAERHKDDSRGLVLPGYKYLGPFNGLDKGEPVNEADAAALEHDKAYDRQLDSGDNPYLKYNHADAEFQERLKEDTSFGGNLGRAVFQAKKRVLEPLGLVEEPVKTAPGKKRPVEHSPAEPDSSSGTGKAGQQPARKRLNFGQTGDADSVPDPQPLGQPPAAPSGLGTNTMASGSGAPMADNNEGADGVGNSSGNWHCDSTWMGDRVITTSTRTWALPTYNNHLYKQISSQSGASNDNHYFGYSTPWGYFDFNRFHCHFSPRDWQRLINNNWGFRPKRLNFKLFNIQVKEVTQNDGTTTIANNLTSTVQVFTDSEYQLPYVLGSAHQGCLPPFPADVFMVPQYGYLTLNNGSQAVGRSSFYCLEYFPSQMLRTGNNFTFSYTFEDVPFHSSYAHSQSLDRLMNPLIDQYLYYLSRTNTPSGTTTQSRLQFSQAGASDIRDQSRNWLPGPCYRQQRVSKTSADNNNSEYSWTGATKYHLNGRDSLVNPGPAMASHKDDEEKFFPQSGVLIFGKQGSEKTNVDIEKVMITDEEEIRTTNPVATEQYGSVSTNLQGGNTQAATADVNTQGVLPGMVWQDRDVYLQGPIWAKIPHTDGHFHPSPLMGGFGLKHPPPQILIKNTPVPANPSTTFSAAKFASFITQYSTGQVSVEIEWELQKENSKRWNPEIQYTSNYNKSVNVDFTVDTNGVYSEPRPIGTRYLTRNL

SEQ ID NO: 200 - DNA, 3161 bp, Artificial Sequence
  source: /note="Description of Artificial Sequence: Synthetic polynucleotide"
gattgaatttagcggccgcgaattcgcccttgctgcgtcaactggaccaatgagaactttccattcaatgattgcgtcgacaagatggtgatctggtgggaggagggaaagatgaccgccaaggtcatggagtcggccaaagccattctcggaggaagcaaggtgcgcgtggaccagaaatgtaagtcctcggcccagatagacccgactcccgtgattgtcacctccaacaccaacatgtgcgccgtgattgacgggaactcaacgaccttcgagcaccagcagccgttgcaagaccggatgttcaaatttgaactcacccgccgtctggatcatgactttgggaaggtcaccaagcaggaagtcaaagactttttccggtgggcaaaggatcacgtggttgaggtggagcatgaattctacgtcaaaaagggtggagccaagaaaagacccgcccccagtgacgcagatataagtgagcccaaacgggcgcgcgggtcagttgcgcagccatcgacgtcagacgcggaagcttcgatcaactacgcggacaggtaccaaaacaaatgttctcgtcacgtgggcatgaatctgatgctgtttccctgcagacaatgcgagagaatgaatcaaaattcaaatatctgcttcactcacggacagaaggactgtttagagtgctttcccgtgtcagaatctcaacccgtttctgtcgtcaaaaaggcgtatcagaaactttgctacattcatcatatcatgggaaaggtgccagacgcttgcactgcctgcgatctggtcaatgtggatttggatgactgcatctctgaacaataaatgatttaaatcaggtatggctgccgatggttatcttccagattggctcaaggacactctctctgaaggaataagacagtggtggaagctcaaacctggcccaccaccaccaaagcccgcagagcggcataaggacgacagcgggggtcttgtgcttcctgggtacaagtacctcggacccttcaacggactcgacaagggagagccggtcaacgaggcagacgccgcggccctcgagtacgacaaggcctacgaccggcagctcgacagcggagacaacccgtacctcaagtacaaccacgccgacgcggagtttcaggagcgccttaaagaagatacgtcttttgggggcaacctcggacgagcagtcttccaggcgaaaaagagggttcttgaacctctgggcctggttgaggaacctgttaagacggctccgggaaaaaagaggccggtagagcactctcctgtggagccagactcctcctcgggaacaggaaaagcgggccagcagcctgcgagaaagagattgaattttggtcagactggagacgcagactccgtacctgacccccagcctctcggacagccaccagcagccccctctggtctgggaactaatacgatggctacaggcagtggcgcaccaatggcagacaataacgagggcgccgacggagtgggtaattcctcgggaagttggcattgcgattccacatggatgggcgacagagtcatcaccaccagcacccgaacctgggctctgcccacctacaacaaccatctgtacaagcagatctccagccaatcaggagccagcaacgacaaccactactttggctacagcaccccttgggggtattttgacttcaacagattccactgccacttttcaccacgtgactggcaaagactcatcaacaacaactggggattccggcccaagagactcaacttcaagctctttaacattcaagtcaaggaggtcacgcagaatgacggtacgacgacgattgccaataaccttaccagcacggttcaggtgtttactgactcggagtaccagctcccgtacgtccccggctcggcgcatcaaggatgcctcccgccgttcccagcagacgtcttcatggtgccacagtatggatacctcaccctgaacaacgggagtcaggcagtaggacgctcttcattttactgcctggagtactttccttctcagatgcttcgtaccggaaacaactttaccttcagctacacctttgaggatgttcctttccacagcagctacgctcacagccagagtttggaccgtctcatgaatcctctcatcgaccagtacctgtattacttgagcagaacaaacactccaagcggaaccaccacgcagtccaggcttcagttttctcaggccggagcaagtgacattcgggaccagtctaggaactggcttcctggaccctgttaccgccagcagcgagtatcaaagacagctgcggacaacaacaacagtgaatactcgtggactggagctaccaagtaccacctcaatggcagagactctctggtgaatccgggcccggccatggccagccacaaggacgatgaagaaaagttttttcctcaaagcggggttctcatctttgggaagcaaggctcagagaaaacaaatgtggacattgaaaaggtcatgattacagacgaagaggaaatcagaaccaccaatcccgtggccacggagcagtatggttctgtatctaccaacctccagagcggcaacacacaagcagctactgcagatgtcaacacacaaggcgttcttccaggcatggtctggcaggacagagacgtgcacctgcaggggcctatctgggcaaagattccacacacggacggacattttcacccctctcccctcatgggcggatttggacttaaacaccctcctccacagattctcatcaagaacaccccggtacctgcaaatccttcgaccaccttcagtgcggcaaagtttgcttccttcatcacacagtattccacagggcaggtcagcgtggagatcgagtgggagctgcagaaggagaacagcaaacgctggaaccccgagatccagtacacttccaactacaacaaatctgttaatgtggactttactgtggacactaatggtgtgtattcagagcctcgccccattggcaccagatacctgactcgtaatctgtaattgcttgttaatcaataaaccgtttaattcgtttcagttgaactttggtctctgcgaagggcgaattcgtttaaaccctgcaggactagtccctttagtgagg

SEQ ID NO: 201 - DNA, 3162 bp, Artificial Sequence
  source: /note="Description of Artificial Sequence: Synthetic polynucleotide"
gaattgaatttagcggccgcgaattcgcccttcgcagagaccaaagttcaactgaaacgaattaaacggtttattgattaacaagcaattacagattacgagtcaggtatctggtgccaatggggcgaggctctgaatacacgccattagtgtccacagtaaagtccacattaacagacttgttgtagttggaagtgtactgaatttcgggattccagcgtttgctgttttccttctgcagctcccactcgatctccacgctgacctgtcccgtggagtactgtgtgatgaaggaagcaaactttgccgcactgaaggtggtcgaaggattcgcaggtaccggggtgttcttgatgagaatctgtggaggagggtgtttaagtccgaatccacccatgaggggagaggggtgaaaatgtccgtccgtgtgtggaatctttgcccagatgggcccctgaaggtacacatctctgtcctgccagaccatgcctggaagaacgccttgtgtgttgacatctgcggtagctgcttgtctgttgcctctctggaggttggtagatacagaaccgtactgctccgtagccacgggattggttgtcctgatttcctcttcgtctgtaatcatgaccttttcaatgtccacatttgttttctctgagccttgcttcccaaagatgagaaccccgctctgaggaaaaaacttttcttcattgtccttgtggcttgccatggccgggcccggattcaccagagagtctctgccattgaggtggtacttggtagctccagtccacgagtattcactgttgttgttatccgcagatgtctttgatactcgctgctggcggtaacagggtccaggaagccagttcctagactggtcccgaatgtcactcgctccggcctgagaaaactgaagccttgactgcgtggtggttccacttggagtgtttgttgtgctcaagtaatacaggtactggtcgatgagaggattcatgagacggtccagactctggctgtgagcgtagccgctgtggaaaggaacgtcctcaaaagtgtagctgaaggtaaagttgtttccggtacgcagcatctgagaaggaaagtactccaggcagtaaaatgaagagcgtcctactgcctgactcccgttgttcagggtgaggtatccatactgtggcaccatgaagacgtctgctgggaacggcgggaggcatccttgatgcgccgagccgaggacgtacgggagctggtactccgagtcagtaaacacctgaaccgtgctggtaaggttattggcaatcgtcgtcgtaccgtcattctgcgtgacctctttgacttgaatgttaaagagcttgaagttgagtctcttgggtcggaatccccagttgttgttgatgagtctttgccagtcacgtggtgaaaagtggcagtggaatctgttgaagtcaaaatacccccaaggggtgctgtagccaaagtagtgattgtcgttcgaggctcctgattggctggaaatttgtttgtagaggtggttgttgtaggtgggcagggcccaggttcgggtgctggtggtgatgactctgtcgcccatccatgtggaatcgcaatgccaatttcccgaggaattacccactccgtcggcgccctcgttattgtctgccattggtgcgccactgcctgtagccatcgtattagttcccagaccagagggggctgctggtggctgtccgagaggctgggggtcaggtactgagtctgcgtctccagtctgaccaaaattcaatctttttcttgcaggctgctggcccgcctttccggttcccgaggaggagtctggctccacaggagagtgctctaccggcctcttttttcctggagccgtcttgacaggttccccaaccaggcccagaggttcaagaaccctctttttcgcctggaagactgctcgtccgaggttgcccccaaaagacgtatcttctttaaggcgctcctgaaactccgcgtcggcgtggttgtacttgaggtacgggttgtctccgctgtcgagctgccggtcgtaggctttgtcgtgctcgagggccgcggcgtctgcctcgttgaccggctctcccttgtcgagtccgttgaagggtccgaggtacttgtacccaggaagcacaagacccctgctgtcgtccttatgccgctctgcgggctttggtggtggtgggccaggtttgagcttccaccactgtcttattccttcagagagagtgtcctcgagccaatctggaagataaccatcggcagccatacctgatttaaatcatttattgttcaaagatgcagtcatccaaatccacattgaccagatcgcaggcagtgcaagcgtctggcacctttcccatgatatgatgaatgtagcacagtttctgatacgcctttttgacgacagaaacgggttgagattctgacacgggaaagcactctaaacagtctttctgtccgtgagtgaagcagatatttgaattctgattcattctctcgcattgtctgcagggaaacagcatcagattcatgcccacgtgacgagaacatttgttttggtacctgtctgcgtagttgatcgaagcttccgcgtctgacgtcgatggctgcgcaactgactcgcgcacccgtttgggctcacttatatctgcgtcactgggggcgggtcttttcttggctccaccctttttgacgtagaattcatgctccacctcaaccacgtgatcctttgcccaccggaaaaagtctttgacttcctgcttggtgaccttcccaaagtcatgatccagacggcgggtgagttcaaatttgaacatccggtcttgcaacggctgctggtgttcgaaggtcgttgagttcccgtcaatcacggcgcacatgttggtgttggaggtgacgatcacgggagtcgggtctatctgggccgaggacttgcatttctggtccacgcgcaccttgcttcctccgagaatggctttggccgactccacgaccttggcggtcatcttcccctcctcccaccagatcaccatcttgtcgacacagtcgttgaagggaaagttctcattggtccagttgacgcagcaagggcgaattcgtttaaacctgcaggactagtccctttagtgaggg

SEQ ID NO: 202 - DNA, 3164 bp, Artificial Sequence
  source: /note="Description of Artificial Sequence: Synthetic polynucleotide"
gcgaattgaatttagcggccgcgaattcgcccttcgcagagaccaaagttcaactgaaacgaattaaacggtttattgattaacaagcaattacaaattacgagtcaggtatctggtgccaatggggcgaggctctgaatacacgccattagtgtccacagtaaagtccacattaacagacttgttgtagttggaagtgtactgaatttcgggattccagcgtttgctgttttccttctgcagctcccactcgatctccacgctgacctgtcccgtggagtactgtgtgatgaaggaagcaaactttgccgcactgaaggtggtcgaaggattcgcaggtaccggggtgttcttgatgagaatctgtggaggagggtgtttaggtccgaatccacccatgaggggagaggggtgaaaatgtccgtccgtgtgtggaatctttgcccagatgggcccctgaaggtacacatctctgtcctgccagaccatgcctggaagaacgccttgtgtgttgacatctgcggtagctgcttgtctgttgcctctctggaggttggtagatacagaaccatactgctccgtagccacgggattggttgtcctgatttcctcttcgtctgtaatcatgaccttttcaatgtccacatttgttttctctgagccttgcttcccaaagatgagaaccccgctctgaggaaaaaacttttcttcattgtccttgtggcttgccatggccgggcccggattcaccagagagtctctgccattgaggtggtacttggtagctccagtccacgagtattcactgttgttgttatccgcagatgtctttgatactcgctgctggcggtaacagggtccaggaagccagttcctagactggtcccgaatgtcactcgctccggcctgagaaaactgaagccttgactgcgtggtggttccacttggagtgtttgttgtgctcaagtaatacaggtactggtcgatgagaggattcatgagacggtccagactctggctgtgagcgtagctgctgtggaaaggaacgtcctcaaaagtgtagctgaaggtaaagttgtttccggtacgcagcatctgagaaggaaagtactccgggcagtaaaatgaagagcgtcctactgcctgactcccgttgctcagggtgaggtatccatactgtggcaccatgaagacgtctgctgggaacggcgggaggcatccttgatgcgccgagccgaggacgtacgggagctggtactccgagtcagtaaacacctgaaccgtgctggtaaggttattggcaatcgtcgtcgtaccgtcattctgcgtgacctctttgacttgaatgttaaagagcttgaagttgagtctcttgggtcggaatccccagttgttgttgatgagtctttgccagtcacgtggtgaaaagtggcagtggaatctgttgaagtcaaaatacccccaaggggtgctgtagccaaagtagtgattgtcgttcgaggctcctgattggctggaaatttgtctgtagaggtggttgttgtaggtgggcagggcccaggttcgggtgctggtggtgatgactctgtcgcccatccatgtggaatcgcaatgccgatttcccgaggaattacccactccgtcggcgccctcgttattgtctgccattggtgcgccactgcctgtagccatcgtattagttcccagaccagagggggctgctggtggctgtccgagaggctgggggtcaggtactgagtctgcgtctccagtctgaccaaaattcaatctttttcttgcaggctgctggcccgcctttccggttcccgaggaggagtctggctccacaggagagtgctctaccggcctcttttttcccggagccgtcttaacaggttccccaaccaggcccagaggttcaagaaccctctttttcgcctggaagactgctcgtccgaggttgcccccaaaagacgtatcttctttaaggcgctcctgaaactccgcgtcggcgtggttgtacttgaggtacgggttgtctccgctgtcgagctgccggtcgtaggctttgtcgtgctcgagggccgcggcgtctgcctcgttgaccggctctcccttgtcgagtccgttgaagggtccgaggtacttgtacccaggaagcacaagacccctgctgtcgtccttatgccgctctgcgggctttggtggtggtgggccaggtttgagcttccaccactgtcttattccttcagagagagtgtcctcgagccaatctggaagataaccatcggcagccatacctgatttaaatcatttattgttcaaagatgcagtcatccaaatccacattgaccagatcgcaggcagtgcaagcgtctggcacctttcccatgatatgatgaatgtagcacagtttctgatacgcctttttgacgacagaaacgggttgagattctgacacgggaaagcactctaaacagtctttctgtccgtgagtgaagcagatatttgaattctgattcattctctcgcattgtctgcagggaaacagcatcagattcatgcccacgtgacgagaacatttgttttggtacctgtctgcgtagttgatcgaagcttccgcgtctgacgtcgatggctgcgcaactgactcgcgcacccgtttgggcccacttatatctgcgtcactgggggcgggtcttttcttggctccaccctttttgacgtagaattcatgctccacctcaaccacgtgatcctttgcccaccggaaaaagtctttgacttcctgcttggtgaccttcccaaagtcatgatccagacggcgggtgagttcaaatttgaacatccggtcttgcaacggctgctggtgttcgaaggtcgttgagttcccgtcaatcacggcgcacatgttggtgttggaggtgacgatcacgggagtcgggtctatctgggccgaggacttgcatttctggtccacgcgcaccttgcttcctccgagaatggctttggccgactccacgaccttggcggtcatcttcccctcctcccaccagatcaccatcttgtcgacacagtcgttgaagggaaagttctcattggtccagttgacgcagcaagggcgaattcgtttaaacctgcaggactagtccctttagtgaggg

SEQ ID NO: 203 - DNA, 3163 bp, Artificial Sequence
  source: /note="Description of Artificial Sequence: Synthetic polynucleotide"
accctcactaaagggactagtcctgcaggtttaaacgaattcgcccttgctgcgtcaactggagcaatgagaactttcccttcaacgactgtgtcgacaagatggtgatttggtgggaggaggggaagatgaccgccaaggtcgtggagtcggccaaagccattctcggaggaagcaaggtgcgcgtggaccagaaatgcaagtcctcggcccagatagatccgactcccgtgatcgtcacctccaacaccaacatgtgcgccgtgattgacgggaactcaacgaccttcgaacaccagcagccgttgcaagaccggatgttcaaatttgaactcacccgccgtctggatcatgactttgggaaggtcaccaagcaggaagtcaaagactttttccggtgggcaaaggatcacgtggttgaggtggagcatggattctacgtcaaaaagggtggagccaagaaaagacccgcccctagtgacgcagatataagtgagcccaaacgggtgcgcgagtcagttgcgcagccatcgacgtcggacgcggaagcttcgatcaactacgcggacaggtaccaaaacaaatgttctcgtcacgtgggcatgaatctgatgctgtttccctgcagacaatgcgagagaatgaatcaaaattcaaatatctgcttcactcacggacagaaagactgtttagagtgctttcccgtgtcagaatctcaacctgtttctgtcgtcaaaaaggcgtatcagaaactgcgctacattcatcatatcatgggaaaggtgccagacgcttgcactgcctgcgatctggtcaatgtggatttggatgactgcatctctgaacaataaatgatttaaatcaggtatggctgccgatggttatcttccagattggctcgaggacactctctctgaaggaataagacagtggtggaagctcaaacctggcccaccaccaccaaagcccgcagagcggcataaggacgacagcaggggtcttgtgcttcctgggtacaagtacctcggacccttcaacggactcgacaagggagagccggtcaacgaggcagacgccgcggccctcgagcacgacaaggcctacgaccggcagctcgacagcggagacaacccgtacctcaagtacaaccacgccgacgcggagtttcaggagcgtcttaaagaagatacgtcttttgggggcaacctcggacgagcagtcttccaggcgaaaaagagggttcttgaacctctgggcctggttgaggaacctgttaagacggctccgggaaaaaagaggccggtagagcactctcctgcggagccagactcctcctcgggaaccggaaaagcgggccagcagcctgcaagaaaaagactgaatttcggtcagactggagacgcagactccgtacctgacccccagcctctcggacagccaccagcagcccccacaagtttgggatctactacaatggctacaggcagtggcgcaccaatggcagacaataacgagggtgccgatggagtgggtaattcctcaggaaattggcattgcgattcccaatggctgggcgacagagtcatcaccaccagcacccgaacctgggccctgcccacctacaacaaccacctttacaagcaaatctccagccaatcaggagcctcaaacgacaaccactactttggctacagcaccccctgggggtattttgacttcaacagattccactgccacttttcaccacgtgactggcaaagactcatcaacaacaactggggattccgacccaagagactcaacttcaagctctttaacattcaagtcaaagaggtcacgcagaatgacggtacgacgacgattgccaataaccttaccagcacggttcaggtgtttactgactcggagtaccagctcccgtacgtcctcggctcggcgcatcaaggatgcctcccgccgtttccagcggacgtcttcatggtcccacagtatggatacctcaccctgaacaacgggagtcaggcggtaggacgctcttccttttactgcctggagtgctttccttctcagatgctgcgtactggaaacaactttcagttcagctacacttttgaagacgtgcctttccacagcagctacgctcacagccagagtttggatcggctgatgaatcctctgatcgaccagtacctgtattatctaaacagaacacaaacagctagtggaactcagcagtctcggctactgtttagccaagctggacccacaagcatgtctcttcaagctaaaaactggctgcctggaccgtgttatcgccagcagcgtttgtcaaagcaggcaaacgacaacaacaacagcaactttccctggactggagctaccaagtaccacctcaatggcagagactctttggtgaacccgggcccggccatggccagccacaaggacgatgaagaaaagtttttccccatgcatggaaccctaatatttggtaaagaaggaacaaatgctaccaacgcggaattggaaaatgtcatgattacagatgaagaggaaatcaggaccaccaatcccgtggctacagagcagtacggatatgtgtcaaataatttgcaaaactcaaatactgctgcaagtactgaaactgtgaatcaccaaggagcattacctggtatggtgtggcaggatcgagacgtgtacctgcagggacccatttgggccaagattcctcacaccgatggacactttcatccttctccactgatgggaggttttggactcaaacacccgcctcctcagattatgatcaaaaacactcccgttccagccaatcctcccacaaacttcagttctgccaagtttgcttccttcatcacacagtattccacgggacaggtcagcgtggagatcgagtgggagctgcagaaggagaacagcaaacgctggaatcccgaaattcagtacacttccaactacaacaaatctgttaatgtggactttactgtggacactaatggtgtgtattcagagcctcgccccattggcaccagatacctgactcgtaatctgtaattgcttgttaatcaataaaccgtttaattcgtttcagttgaactttggtctctgcgaagggcgaattcgcggccgctaaattcaattcgcc

SEQ ID NO: 204 - protein, 735 aa, Artificial Sequence
  source: /note="Description of Artificial Sequence: Synthetic polypeptide"
MAADGYLPDWLEDTLSEGIRQWWKLKPGPPPPKPAERHKDDSRGLVLPGYKYLGPFNGLYKGEPVDEADAAALEHDKAYDRQLDSGDNPYLKYNHADAEFQERLKEDTSFGGNLGRAVFQAKKRVLEPLGLVGEPVKTAPGKKRPVEHSPVEPDSSSGTGKAGNQPARKRLNFGQTGDADSVPDPQPLGQPPAAPSGLGSTTMATGSGAPVADNNEGADGVGNSSGNWHCDSQWLGDRVITTSTRTWALPTYNNHLYKQISSQSGASNDNHYFGYSTPWGYFDFNRFHCHFSPRDRQRLINNNWGFRPKRLNFKLFNIQVKEVTQNDGTTTIANNLTSTVQVFTDSGYQLPYVLGLAHQGCLPPFPADVFMVPQYGYLTLNNGSQAVGRSSFYCLEYFPSQMLRTGNNFQFSYTFEDVPFHSSYAHSQSLDRLMNPLIDQYLYYLNKTQSNSGTLQQSRLLFSQAGPTSMSLQAKNWLPGPCYRQQRLSKQANDNNNSNFPWTAATKYHLNGRDSLVNPGPAMASHKDDEEKFFPMHGTLIFGKQGTNANDADLDNVMITDEEEIRTTNPVATEQYGYVSNNLQNSNTGPTTGTVNHQGALPGMVWQDRDVYLQGPIWAKIPHTDGHFHPSPLMGGFGLKHPPPQIMIKNTPVPANPPTNFSSAKFASFITQYSTGQVSVEIEWELQKEDSKRWNPEIQYTSNYNKPVNVDFTVDTNGVYSEPRPIGTRYLTRNL

SEQ ID NO: 205 - DNA, 2208 bp, Artificial Sequence
  source: /note="Description of Artificial Sequence: Synthetic polynucleotide"
atggctgccgatggttatcttccagattggctcgaggacactctctctgaaggaataagacagtggtggaagctcaaacctggcccaccaccaccaaagcccgcagagcggcataaggacgacagcaggggtcttgtgcttcctgggtacaagtacctcggacccttcaacggactctacaagggagagccggtcgacgaggcagacgccgcggccctcgagcacgacaaggcctacgaccggcagctcgacagcggagacaacccgtacctcaagtacaaccacgccgacgcggagtttcaggagcgccttaaagaagatacgtcttttgggggcaacctcggacgagcagtcttccaggccaaaaagagggttcttgaacctctgggcttggttggggagcctgttaaaacggctccgggaaaaaagaggccggtagagcactctcctgtggagccagactcctcctcgggaaccggaaaagcgggcaaccagcctgcaagaaaaagattgaattttggtcagactggagacgcagactccgtacctgacccccagcctctcggacagccaccagcagccccctctggtctgggatctactacaatggctacaggcagtggcgcaccagtggcagacaataacgagggtgccgatggagtgggtaattcctcaggaaattggcattgcgattcccaatggctgggcgacagagtcatcaccaccagcacccgaacctgggctctgcccacctacaataaccacctctacaagcaaatctccagccaatcaggagcctcaaacgacaaccactactttggctacagcaccccctgggggtattttgacttcaacagattccactgccacttttcaccacgtgaccggcaaagactcatcaacaacaactggggattccgaccaaaaagactcaacttcaagctctttaacattcaagtcaaagaggtcacgcagaatgacggtacgacgacgattgccaataaccttaccagcacggttcaggtgtttactgactcggggtaccagctcccgtacgtcctcggcttggcgcatcaaggatgcctcccgccgttcccagcagacgtcttcatggtgccacagtatggatacctcaccctgaacaacgggagtcaggcggtaggacgctcttccttttactgcctggagtactttccttctcagatgctgcgtactggaaacaactttcagttcagctacacctttgaagacgttcctttccacagcagctacgctcacagccagagtctggatcggctgatgaatcctctgatcgaccagtacctgtattatctgaacaagacacaatcaaatagtggaactcttcagcagtctcggctactgtttagccaagctggacccaccagcatgtctcttcaagctaaaaactggctgcctggaccttgctacagacagcagcgtctgtcaaagcaggcaaacgacaacaacaacagcaactttccctggactgcggctacaaagtatcatctaaatggccgggactcgttggttaatccaggaccagctatggccagccacaaagacgatgaagaaaagtttttccccatgcatggaaccctgatatttggtaaacaaggaacaaatgctaacgacgcggatttggacaatgtcatgattacagatgaagaagaaatccgcaccaccaatcccgtggctacggagcagtacggatatgtgtcaaataatttgcaaaactcaaatactggtccaactactggaactgtcaatcaccaaggagcgttacctggtatggtgtggcaggatcgagacgtgtacctgcagggacccatttgggccaagattcctcacaccgatggacactttcatccttctccacttatgggaggttttggactcaaacacccacctcctcagatcatgattaaaaacactcccgttccagccaatcctcccacaaacttcagttctgccaagtttgcttctttcatcacacagtattccacgggacaagtcagcgtggagatcgagtgggagctgcagaaggaggacagcaaacgctggaaccccgagatccagtacacttccaactataacaaacctgttaatgtggactttactgtggacactaatggtgtgtattcagagcctcgccccattggcaccagatacctgactcgtaatctgtaa

SEQ ID NO: 206 - DNA, 3161 bp, Artificial Sequence
  source: /note="Description of Artificial Sequence: Synthetic polynucleotide"
cgaattgatttagcggccgcgaattcgcccttcgcagagaccaaagttcaactgaaacgaattaaacggtttattgattaacaagcaattacagattacgagtcaggtatctggtgccaatggggcgaggctctgaatacacaccattagtgtccacagtaaagtccacattaacagatttgttgtagttggaagtgtactggatctcgggattccagcgtttgctgttctccttctgtagctcccactcgatctccacgctgacccgccccgtggaatactgtgtgatgaaggaagcaaactttgccgcactgaaggtggtcgaaggattcgcaggtaccggggtgtttttgatgagaatctgtggaggagggtgtttaagtccgaatccgcccatgaggggagaggggtgaaaatgtccgtccgtgtgcggaatctttgcccagataggcccctgcaggtacacgtctctgtcctgccagaccatgcctggaagaacgccttgtgtgttgacatctgcagtagatgcttgtgtgttgccgctctggaggttggtagatacagaaccatactgctccgtggccacgggattggtggttctgatttcctcttcgtctgtaatcatgaccttttcaatgtccacatttgttttctctgatccttgttttccaaagatgagaaccccgctctgaggaaaaaacttttcttcatcgtccttgtggctggccattgccgggcccggattcaccagagagtctctgccattgaggtggtacttggtagctccaatccacgagtattcactgttgttgttgtccgcagatgtctttgatactcgctgctggcggtaacagggtccaggaagccagttcctagactgatcccgaatgtcactcgctccggcctgagaaaactgaagcctggactgcgtggtggttccgcttggagtgtttgttctgctcaagtaatacaggtactggtcgatgagaggattcatgagacggtccaaactctggctgtgagcgtagctgctgtggaaaggaacatcctcaaaggtgtagctgaaggtaaagttgtttccggtacgcagcatctgagaagggaagtactccaggcagtaaaatgaagagcgtcctactgcctgactcccgttgttcagggtgaggtatccatactgtggcaccatgaagacgtctgctgggaacggcgggaggcatccttgatgcgccgagccgaggacgtacgggagctggtactccgagtcagtaaacacctgaaccgtgctggtaaggttattggcaatcgtcgtcgtaccatcattctgcgtgacctctctgacttgaatgttaaagagcttgaagttgagtctcttgggccggaatccccagttgttgttgatgagtctttgccagtcacgtggtgaaaagtggcagtggaatctgttgaagtcaaaatacccccaaggggtgctgtagccaaagtagtggttgtcgttgctggctcctgattggctggaaatctgcttgtacagatggttgttgtaggtgggcagagcccaggttcgggtgctggtggtgatgactctgtcgcccatccatgtggaatcgcaatgccaatttcccgaggaattacccactccgtcggcgccatcgttattgtctgccattggtgcgccactgcctgtagccatcgtattagttcccagaccagagggggctgctggtggctgtccgagaggctgggggtcaggtacggagtctgcgtctccagtctgaccgaaattcaatctctttcttgcaggctggttgcccgcttttccggttcccgaggaggagtctggctccacaggagagtgctctaccggcctcttttttcccggagccgtcttaacaggctcctcaaccaggcccagaggttcaagaaccctcttttttgcctggaagactgctcgtccgaggttgcccccaaaagacgtatcttctttaaggcgctcctgaaactccgcgtcggcgtggtcgtacttgaggtacgggttgtctccgctgtcgagctgccggtcgtaggccttgtcgtgctcgagggccgcggcgtctgcctcgttgaccggctctcccttgtcgagtccgttgaagggtccgaggtacttgtacccaggaagcacaagacccctgctgtcgtccttatgccgctctgcgggctttggtggtggtgggccaggtttgagcttccaccactgtcttattccttcagagagagtgtcctcgagccaatctggaagataaccatcggcagccatacctgatttaaatcatttattgttcagagatgcagtcatccaaatccacattgaccagatcgcaggcagtgcaagcgtctggcacctttcccatgatatgatgaatgtagcaaagtttctgatacgcctttttgacgacagaaacgggttgagattctgacacgggaaagcactctaaacagtctttctgtccgtgagtgaagcagatatttgaattctgattcattctctcgcattgtctgcagggaaacagcatcagattcatgcccacgtgacgagaacatttgttttggtacctgtccgcgtagttgatcgaagcttccgcgtctgacgtcgatggctgcgcaactgactcgcgcgcccgtttgggctcacttatatctgcgtcactgggggcgggtcttttcttggctccaccctttttgacgtagaattcatgctccacctcaaccacgtgatcctttgcccaccggaaaaagtctttcacttcctgcttggtgaccttcccaaagtcatgatccagacggcgggttagttcaaatttgaacatccggtcttgcaacggctgctggtgttcgaaggtcgttgagttcccgtcaatcacggcgcacatgttggtgttggaggtggcgatcacgggagtcgggtctatctgggccgaggacttgcacttttggtccacgcgcaccttgcttcctccgagaatggcttcggccgattccacgaccttggcggtcatctttccctcctcccaccagatcaccatcttgtcgacacagtcgttgaagggaaagttctcattggtccagttgacgcagcaagggcgaattcgtttaaacctgcaggaactagtcccttagtgagg

SEQ ID NO: 207 - protein, 735 aa, Artificial Sequence
  source: /note="Description of Artificial Sequence: Synthetic polypeptide"
MAADGYLPDWLEDTLSEGIRQWWKLKPGPPPPKPAERHKDDSRGLVLPGYKYLGPFNGLYKGEPVNEADAAALEHDKAYDRQLDSGDNPYLKYNHAGAEFQERLKEDTSFGGNLGRAVFQAKKRVLEPLGLVEEPVKTAPGKKRPVEHSPVEPDSSSGTGKAGNQPARKRLNFGQTGDADSVPDPQPLGQPPAAPSGLGSTTMATGSGAPVADNNEGADGVGNSSGNWHCDSQWLGDRVITTSTRTWALPTYNNHLYKQISSQSGASNDNHYFGYSTPWGYFDFNRFHCHFSPRDWQRLINNNWGFRPKRLNFKLFNIQVKEVTQNDGTTTIANNLTSTVQVFTDSEYQLPYVLGSAHQGCLPPFPADVFMVPQYGYLTLNNGSQAVGRSSFYCLEYFPSQMLRTGNNFQFSYTFEDVPFHSSYAHSQSLDRLMNPLIDQYLYYLNKTQSNSGTLQQSRLLFSQAGPTSMSLQAKNWLPGPCYRQQRLSKQANDNNNSNFPWTAATKYHLNGRDSLVNPGPAMASHKDDEEKFFPMHGTLIFGKQGTNANDADLDNVMITDEEEIRTTNPVATEQYGYVSNNLQDSNTGPTTGTVNHQGALPGMVWQDRDVYLQGPIWAKIPHTDGHFHPSPLMGGFGLKHPPPQIMIKNTPVPANPPTNFSSAKFASFITQYSTGQVSVEIEWELQKENSKRWNPEIQYTSNYNKSVNVDFTVDTNGVYSEPRPIGTRYLTRNL

SEQ ID NO: 208 - DNA, 2208 bp, Artificial Sequence
  source: /note="Description of Artificial Sequence: Synthetic polynucleotide"
atggctgccgatggttatcttccagattggctcgaggacactctctctgaaggaataagacagtggtggaagctcaaacctggcccaccaccgccaaagcccgcagagcggcataaggacgacagcaggggtcttgtgcttcctgggtacaagtacctcggacccttcaacggactctacaagggagagccggtcaacgaggcagacgccgcggccctcgagcacgacaaggcctacgaccggcagctcgacagcggagacaacccgtacctcaagtacaaccacgccggcgcggagtttcaggagcgccttaaagaagatacgtcttttgggggcaacctcggacgagcagtcttccaggccaaaaagagggttcttgaacctctgggcttggttgaggagcctgttaaaacggctccgggaaaaaagaggccggtagagcactctcctgtggagccagactcctcctcgggaaccggaaaagcgggcaaccagcctgcaagaaaaagattgaattttggtcagactggagacgcagactccgtacctgacccccagcctctcggacagccaccagcagccccctctggtctgggatctactacaatggctacaggcagtggcgcaccagtggcagacaataacgagggtgccgatggagtgggtaattcctcaggaaattggcattgcgattcccaatggctgggcgacagagtcatcaccaccagcacccgaacctgggctctgcccacctacaacaaccacctctacaagcaaatctccagccaatcaggagcctcaaacgacaaccactactttggctacagcaccccctgggggtattttgacttcaacagattccactgccacttttcaccacgtgactggcaaagactcatcaacaacaactggggattccgaccaaagagactcaacttcaagctctttaacattcaagtcaaagaggtcacgcagaatgacggtacgacgacgattgccaataaccttaccagcacggttcaggtgtttactgactcggagtaccagctcccgtacgtcctcggctcggcgcatcaaggatgcctcccgccgttcccagcagacgtcttcatggtgccacagtatggatacctcaccctgaacaacgggagtcaggcggtaggacgctcttccttttactgcctggagtactttccttctcagatgctgcgtactggaaacaactttcagttcagctacacctttgaagacgttcctttccacagcagctacgctcacagccagagtctggatcggctgatgaatcctctgatcgaccagtacctgtattatctgaacaagacacaatcaaatagtggaacccttcagcagtctcggctactgtttagccaagctggacccaccagcatgtctcttcaagctaaaaactggctgcctggaccttgctacagacagcagcgtctgtcaaagcaggcaaacgacaacaacaacagcaactttccctggactgcggctacaaagtatcatctaaatggccgggactcgttggttaatccaggaccagctatggccagccacaaagacgatgaagaaaagtttttccccatgcatggaaccctgatatttggtaaacaaggaacaaatgctaacgacgcggatttggacaatgtcatgattacagatgaagaagaaatccgcaccaccaatcccgtggctacggagcagtacggatatgtgtcaaataatttgcaagactcaaatactggtccaactactggaactgtcaatcaccaaggagcgttacctggtatggtgtggcaggatcgagacgtgtacctgcagggacccatttgggccaagattcctcacaccgatggacactttcatccttctccacttatgggaggttttggactcaaacacccacctcctcagatcatgattaaaaacactcccgttccagccaatcctcccacaaacttcagttctgccaagtttgcttctttcatcacacagtattccacgggacaagtcagcgtagagatcgagtgggagctgcagaaggagaacagcaaacgctggaaccccgagatccagtacacttccaactataacaaatctgttaatgtggactttactgtggacactaatggtgtgtattcagagcctcgccccattggcaccagatacctgactcgtaatctgtaa

SEQ ID NO: 209 - protein, 738 aa, Artificial Sequence
  source: /note="Description of Artificial Sequence: Synthetic polypeptide"
MAADGYLPDWLEDNLSEGIREWWDLKPGAPKPKANQQKQDDGRGLVLPGCKYLGPFNGLDKGEPVNAADAAALEHDKAYDQQLKAGDNPYLRYNHADAEFQERLQEDTSFGGNLGRAVFQAKKRVLEPLGLVEEGAKTAPGKKRPVEPSPQRSPDSSTGIGKTGQQPAKKRLNFGQTGDSESVPDPQPIGEPPAGPSGLGSGTMAAGGGAPMADNNEGADGVGSSSGNWHCDSTWLGDRVITTSTRTWALPTYNNHLYKQISNGTSGGSTNDNTYFGYSTPWGYFDFNRFHCHFSPRDWQRLINNNWGFRPKRLNFKLFNIQVKEVTQNEGTKTIANNLTSTIQVFTDSEYQLPYVLGSAHQGCPPPFPADVFMIPQYGYLTLNNGSQAVGRSSFYCLEYFPSQMRRTGNNFEFSYQFEDVPFHSSYAHSQSLDRLMNPLIDQYLYYLSRTQSTGGTAGTQQLLFSQAGPNNMSAQAKNWLPGPCYRQQRVSTTLSQNNNSNFAWTGATKYHLNGRDSLVNPGVAMATHKDDEERFFPSSGVLMFGKQGAGKDNVDYSSVMLTSEEEIKTTNPVATEQYGVVADNLQQQNAAPIVGAVNSQGALPGMVWQNRDVYLQGPIWAKIPHTDGNFHPSPLMGGFGLKHPPPQILIKNTPVPADPPTTFSQAKLASFITQYSTGQVSVEIEWELQKENSKRWNPEIQYTSNYNKSVNVDFTVDTNGVYSEPRPIGTRYLTRNL

SEQ ID NO: 210 - DNA, 2217 bp, Artificial Sequence
  source: /note="Description of Artificial Sequence: Synthetic polynucleotide"
atggctgccgatggttatcttccagattggctcgaggacaacctctctgagggcattcgcgagtggtgggacttgaaacctggagccccgaaacccaaagccaaccagcaaaagcaggacgacggccggggtctggtgcttcctggctgcaagtacctcggacccttcaacggactcgacaagggggagcccgtcaacgcggcggacgcagcggccctcgagcacgacaaggcctacgaccagcagctcaaagcgggtgacaatccgtacctgcggtataaccacgccgacgccgagtttcaggagcgtctgcaagaagatacgtcttttgggggcaacctcgggcgagcagtcttccaggccaagaagcgggttctcgaacctctcggtctggttgaggaaggcgctaagacggctcctggaaagaagagaccggtagagccatcaccccagcgttctccagactcctctacgggcatcggcaagacaggccagcagcccgcgaaaaagagactcaactttgggcagactggcgactcagagtcagtgcccgaccctcaaccaatcggagaaccccccgcaggcccctctggtctgggatctggtacaatggctgcaggcggtggcgctccaatggcagacaataacgaaggcgccgacggagtgggtagttcctcaggaaattggcattgcgattccacatggctgggcgacagagtcatcaccaccagcacccgaacctgggccctccccacctacaacaaccacctctacaagcaaatctccaacgggacatcgggaggaagcaccaacgacaacacctacttcggctacagcaccccctgggggtattttgactttaacagattccactgccacttctcaccacgtgactggcagcgactcatcaacaacaactggggattccggcccaagagactcaacttcaagctcttcaacatccaggtcaaggaggtcacgcagaatgaaggcaccaagaccatcgccaataaccttaccagcacgattcaggtctttacggactcggaataccagctcccgtacgtcctcggctctgcgcaccagggctgcccgcctccgttcccggcggacgtcttcatgattcctcagtacgggtacctgactctgaacaacggcagtcaggccgtgggccgttcctccttctactgcctggagtactttccttctcaaatgcggagaacgggcaacaactttgagttcagctaccagtttgaggacgtgccttttcacagcagctacgcgcatagccaaagcctggaccggctgatgaaccccctcatcgaccagtacctgtactacctgtctcggactcagtccacgggaggtaccgcaggaactcagcagttgctattttctcaggccgggcctaataacatgtcggctcaggccaaaaactggctacccgggccctgctaccggcagcaacgcgtctccacgacactgtcgcaaaataacaacagcaactttgcttggaccggtgccaccaagtatcatctgaatggcagagactctctggtaaatcccggtgtcgctatggcaacgcacaaggacgacgaagagcgattttttccatccagcggagtcttgatgtttgggaaacagggagctggaaaagacaacgtggactatagcagcgttatgctaaccagtgaggaagaaatcaaaaccaccaacccagtggccacagaacagtacggcgtggtggccgataacctgcaacagcaaaacgccgctcctattgtaggggccgtcaacagtcaaggagccttacctggcatggtctggcagaaccgggacgtgtacctgcagggtcctatctgggccaagattcctcacacggacggcaactttcatccttcgccgctgatgggaggctttggactgaaacacccgcctcctcagatcctgattaagaatacacctgttcccgcggatcctccaactaccttcagtcaagccaagctggcgtcgttcatcacgcagtacagcaccggacaggtcagcgtggaaattgaatgggagctgcagaaagagaacagcaagcgctggaacccagagattcagtatacttccaactataacaaatctgttaatgtggactttactgtggacactaatggtgtgtattcagagcctcgccccattggcaccagatacctgactcgtaatctgtaa

SEQ ID NO: 211 - DNA, 3167 bp, Artificial Sequence
  source: /note="Description of Artificial Sequence: Synthetic polynucleotide"
attgaatttagcggccgcgaattcgcccttcgcagagaccaaagttcaactgaaacgaattaaacggtttattgattaacaagcaattacagattacgagtcaggtacctggtgccaatggggcgaggctctgaatacacaccattagtgtccacagtaaagtccacattaacagatttgttgtagttggaagtgtactgaatctcgggattccagcgtttgctgttctccttctgcagctcccactcgatctccacgctgacctgccccgtggagtactgtgtaatgaaggaagcaaactttgccgcactgaaggtagtcgaaggattcgcaggtaccggggtgttcttgatgagaatctgcgggggagggtgtttaagtccgaatccgcccatgaggggagaggggtgaaaatgtccgtccgtgtgtggaatctttgcccagatgggcccctgcaggtacacgtctctgtcctgccacaccatgcctggaagaacgccttgtgtgttgacatctgaggtagctgcttgtgtgttgccgctctggaggttggtagatacagaaccatactgctccgtagccacgggattggtggtcctgatttcctcttcgtctgtaatcatgaccttttcaatgtccacattagtttttcccgagtcttgttttccaaagatgagaaccccgctctgaggaaaaaacttttcttcatcgtccttgtggctggccatggccgggcccggattcaccagagagtctcttccattaaggtggtacttggtagctccagtccacgagtattcactgttgttgttatccgcagatgtctttgatactcgctgctggcggtaacagggtccaggaagccagttcctagactggtcccgaatgtcacttgctccggcctgagaaaactgaagccttgactgcgtggtggttccgcttggagtgtttgttctgctcaagtaatacaggtactggtcgatgagaggattcatgagacggtccaaactctggctgtgggcgtagctgctgtggaaaggaacgtcctcaaaggtgtagctgaaggtaaagttgtttccggtacgcagcatctgagaaggaaagtactccaggcagtaaaatgaagagcgtcctactgcctgactcccgttgttcagggtgaggtatccatactgtggcaccatgaagacgtctgctgggaacggcgggaggcatccttgatgcgccgagccgaggacgtacgggagctggtactccgagtcagtaaacacctgaaccgtgctggtaaggttattggcaatcgtcgtcgtaccgtcattctgcgtgacctccttgacttgaatgttaaagagcttgaagttgagtcttttgggccggaatccccaattgttgttgatgagtctttgccagtcacgtggcgaaaagtggcagtggaatctgttgaagtcaaaatacccccaaggggtgctgtagccaaagtagtggttgtcgtttgaggctcctgattggctggaaatctgcttgtagaggtggttgttgtaggtgggcagagcccaggtgcgggtgctggtggtgatgactctgtcgcccatccatgtggaatcgcaatgccaatttcccgaggaattacccactccgtcggcgccctcgttattgtctgccattggtgcgccactgcctgtagccatcgtattagttcccagaccagagggggctgctggtggctgtccgagaggctgggggtcaggtacggagtctgcgtctccagtctgaccgaaattcaatctctttcttgcaggctgctggcccgcttttccggttcccgaggaggagtctggctccgcaggagagtgctctaccggcctcttttttcccggagccgtcttaacaggttcctcaaccaggcccagaggttcaagaaccctctttttcgcctggaagactgctcgtccgaggttgcccccaaaagacgtatcttctttaagacgctcctggaactccgcgtcggcgtggttgtacttggggtacgggttgtctccgctgtcgagctgccggtcgtaggccttgtcgtgctcgagggccgcggcgtctgcctcgttgaccggctctcccttgtcgagtccgttgaagggtccaaggtacttgtacccaggaagcacaagacccctgctgtcgtccttatgccgctctgcgggctttggtggtggtgggccaggtttgagcttccaccactgtcttattccttcagagagagtgtcctcgagccaatctggaagataaccatcggcagccatacctgatttaaatcatttattgttcagagatgcagtcatccaaatccacattgaccagatcgcaagcagtgcaagcgtctggcacctttcccatgatatgatgaatgtagcacagtttctgatacgcctttttgacgacagaaacgggttgagattctgacacgggaaagcactctaaacagtctttctgtccgtgagtgaagcagatatttgaattctgattcattctctcgcattgtctgcagggaaacagcatcagattcatgcccacgtgacgagaacatttgttttggtacctgtccgcgtagttgattgaagcttccgcgtctgacgtcgatggctgcgcaactgactcgcgcgcccgtttgggctcacttatatctgcgtcactgggggcgggtctttttttggctccaccctttttgacgtagaattcatgctctacctcaaccacgtgatcctttgcccaccggaaaaagtctttgacttcctgcttggtgaccttcccaaagtcatgatccagacggcgggtgagttcaaatttgaacatccggtcttgcaacggctgctggtgttcgaaggtcgttgagttcccgtcaatcactgcgcacatgttggtgttggaggtgacaatcacgggagtcgggtctatctgggccgaggacttgcatttctggtccacgcgcaccttgcttcctccgagaatggctttggccgactccacgaccttggcggtcatcttcccctcctcccaccagatcaccatcttgtcgacgcaatcattgaaaggaaagttctcattggtccagttgacgcagccgtagaaagggcgaattcgtttaaacctgcaggactagtccctttagtgagggt

SEQ ID NO: 212 - DNA, 3161 bp, Artificial Sequence
  source: /note="Description of Artificial Sequence: Synthetic polynucleotide"
aattgaatttagcggccgcgaattcgcccttcgcagagaccaaagttcaactgaaacgaattaaacggtttattgattaacaagcaattacagattacgagtcaggtatctggtgccaatggggcgaggctctgaatacacaccattagtgtccacagtaaagtccacattaacagatttgttgtagttggaagtgtactgaatctcgggattccagcgtttgctgttctccttctgcagctcccactcgatctccacgctgacctgccccgtggagtactgtgtaatgaaggaagcaaactttgccgcactgaaggtagtcgaaggattcgcaggtaccggggtgttcttgatgagaatctgcgggggagggtgtttaagtccgaatccgcccatgaggggagaggggtgaaaatgtccgtccgtgtgtggaatctttgcccagatgggcccctgcaggtacacgtctctgtcctgccacaccatgcctggaagaacgccttgtgtgttgacatctgaggtagctgcttgtgtgttgccgctctggaggttggtagatacagaaccatactgctccgtagccacgggattggtggtcctgatttcctcttcgtctgtaatcatgaccttttcaatgtccacattagtttttcccgagtcttgttttccaaagatgagaaccccgctctgaggaaaaaacttttcttcatcgtccttgtggctggccatggccgggcccggattcaccagagagtctcttccattaaggtggtacttggtagctccagtccacgagtattcactgttgttgttatccgcagatgtctttgatactcgctgctggcggtaacagggtccaggaagccagttcctagactggtcccgaatgtcacttgctccggcctgagaaaactgaagccttgactgcgtggtggttccgcttggagtgtttgttctgctcaagtaatacaggtactggtcgacgagaggattcatgagacggtccaaactctggctgtgggcgtagctgctgtggaaaggaacgtcctcaaaggtgtagctgaaggtaaagttgtttccggtacgcagcatctgagaaggaaagtactccaggcagtaaaatgaagagcgtcctactgcctgactcccgttgttcagggtgaggtatccatactgtggcaccatgaagacgtctgctgggaacggcgggaggcatccttgatgcgccgagccgaggacgtacgggagctggtactccgagtcagtaaacacctgaaccgtgctggtaaggttattggcaatcgtcgtcgtaccgtcattctgcgtgacctccttgacttgaatgttaaagagcttgaagttgagtcttttgggccgggatccccaattgttgttgatgagtctttgccagtcacgtggcgaaaagtggcagtggaatctgttgaagtcaaaatacccccaaggggtgctgtagccaaagtagtggttgtcgtttgaggctcctgattggctggaaatctgcctgtagaggtggttgttgtaggtgggcagagcccaggtgcgggtgctggtggtgatgactctgtcgcccatccatgtggaatcgcaatgccaatttcccgaggaattacccactccgtcggcgccctcgttattgtctgccattggtgcgccactgcctgtagccatcgtattagttcccagaccagagggggctgctggtggctgtccgagaggctgggggtcaggtacggagtctgcgtctccagtctgaccgaaattcaatctccttcttgcaggctgctggcccgcttttccggttcccgaggaggagtctggctccgcaagagagtgctctaccggcctcttttttcccggagccgtcttaacaggttcctcaaccaggcccagaggttcaagaaccctctttttcgcctggaagactgctcgtccgaggttgcccccaaaagacgtatcttctttaagacgctcctggaactccgcgtcggcgtggttgtacttgaggtacgggttgtctccgccgtcgagctgccggtcgtaggccttgtcgtgctcgagggccgcggcgtctgcctcgttgaccggctctcccttgtcgagtccgttgaagggtccaaggtacttgtacccaggaagcacaagacccctgctgtcgtccttatgccgctctgcgggctttggtggtggtgggccaggtttgagcttccaccactgtcttattccttcagagagagtgtcctcgagccaatctggaagataaccatcggcagccatacctgatttaaatcatttattgttcagagatgcagtcatccaaatccacattgaccagatcgcaagcagtgcaagcgtctggcacctttcccatgatatgatgaatgtagcacagtttctgatacgcctttttgacgacagaaacgggttgagattctgacacgggaaagcactctaaacagtctttctgtccgtgagtgaagcagatatttgaattctgattcattctctcgcattgtctgcagggaaacagcatcagattcatgcccacgtgacgagaacatttgttttggtacctgtccgcgtagttgattgaagcttccgcgtctgacgtcgatggctgcgcaactgactcgcgcgcccgtttgggctcacttatatctgcgtcactgggggcgggtctttttttggctccaccctttttgacgtagaattcatgctctacctcaaccacgtgatcctttgcccaccggaaaaagtctttgacttcctgcttggtgaccttcccaaagtcatgatccagacggcgggtgagttcaaatttgaacatccggtcttgcaacggctgctggtgttcgaaggtcgttgagttcccgtcaatcactgcgcacatgttggtgttggaggtgacaatcacgggagtcgggtctatctgggccgaggacttgcatttctggtccacgcgcaccttgcttcctccgagaatggctttggccgactccacgaccttggcggtcatcttcccctcctcccaccagatcaccatcttgtcgacgcaatcattgaaaggaaagttctcattggtccagttgacgcagcaagggcgaattcgtttaaacctgcaggactagtccctttagtgaggg

SEQ ID NO: 213 - DNA, 3172 bp, Artificial Sequence
  source: /note="Description of Artificial Sequence: Synthetic polynucleotide"
gattgaatttagcggccgcgaattcgcccttgctgcgtcaactggaccaatgagaactttcccttcaacgattgcgtcgacaagatggtgatctggtgggaggagggcaagatgaccgccaaggtcgtggagtccgccaaggccattctgggtggaagcaaggtgcgcgtggaccaaaagtgcaagtcatcggcccagatcgaccccacgcccgtgatcgtcacctccaacaccaacatgtgcgccgtgatcgacgggaacagcaccaccttcgagcaccagcagcccctgcaggaccgcatgttcaagttcgagctcacccgccgtctggagcacgactttggcaaggtgaccaagcaggaagtcaaagagttcttccgctgggctcaggatcacgtgactgaggtggcgcatgagttctacgtcagaaagggcggagccaccaaaagacccgcccccagtgacgcggatataagcgagcccaagcgggcctgcccctcagttgcggagccatcgacgtcagacgcggaagcaccggtggactttgcggacaggtaccaaaacaaatgttctcgtcacgcgggcatgcttcagatgctgtttccctgcaagacatgcgagagaatgaatcagaatttcaacgtctgcttcacgcacggggtcagagactgctcagagtgcttccccggcgcgtcggaatctcaacccgtcgtcagaaaaaagacgtatcagaaactgtgcgcgattcatcatctgctggggcgggcacccgagattgcgtgttcggcctgcgatctcgtcaacgtggacttggatgactgtgtttctgagcaataaatgacttaaaccaggtatggctgctgacggttatcttccagattggctcgaggacaacctctctgagggcattcgcgagtggtgggacctgaaacctggagcccccaagcccaaggccaaccagcagaagcaggacgacggccggggtctggtgcttcctggctacaagtacctcggacccttcaacggactcgacaagggggagcccgtcaacgcggcggacgcagcggccctcgagcacgacaaggcctacgaccagcagctcaaagcgggtgacaatccgtacctgcggtataaccacgccgacgccgagtttcaggagcgtctgcaagaagatacgtcttttgggggcaacctcgggcgagcagtcttccaggccaagaagcgggttctcgaacctctcggtctggttgaggaagctgctaagacggctcctggaaagaagagaccggtagaaccgtcacctcagcgttcccccgactcctccgcgggcatcggcaagaaaggccagcagcccgctaaaaagagactgaactttggtcagactggcgactcagagtcagtccccgaccctcaaccaatcggagaaccaccagcaggcccctctggtctgggatctggtacaatggctgcaggcggtggcgctccaatggcagacaataacgaaggcgccgacggagtgggtagttcctcaggaaattggcattgcgattccacatggctgggcgacagagtcatcaccaccagcacccgaacctgggccctgcccacctacaacaaccacctctacaagcaaatatccaatgggacatcgggaggaagcaccaacgacaacacctacttcggctacagcaccccctgggggtattttgacttcaacagattccactgccacttctcaccacgtgactggcagcgactcatcaacaacaactggggattccggccaaaaagactcagcttcaagctcttcaacatccaggtcaaggaggtcacgcagaatgaaggcaccgagaccatcgccaataaccttaccagcacgattcaggtatttacggactcggaataccagctgccgtacgtcctcggctccgcgcaccagggctgcctgcctccgttcccggcggacgtcttcatgattccccagtacggctaccttacactgaacaatggaagtcaagccgtaggccgttcctccttctactgcctggaatattttccatctcaaatgctgcgaactggaaacaattttgaattcagctacaccttcgaggacgtgcctttccacagcagctgcgcacacagccagagctcggaccgactgatgaatcctctcatcgaccagtacctgtactacttatccagaactcggtccacaggaggaactcaaggtacccagcaattgttattttctcaagctgggcctgcaaacatgtcggctcaggctaagaactggctacctggaccttgctaccggcagcagcgagtctctacgacactgtcgcaaaacaacaacagcaactttgcttggactggtgccaccaaatatcacctgaacggaagagactctttggtaaatcccggtgtcgccatggcaacccacaaggacgacgaggaacgcttcttcccgtcgagtggagtcctgatgtttggaaaacagggtgctggaagagacaatgtggactacagcagcgttatgctaaccagcgaagaagaaattaaaaccactaaccctgtagccacagaacaatacggtgtggtggctgacaacttgcagcaaaccaatacagggcctattgtgggaaatgtcaacagccaaggagccttacctggcatggtctggcagaaccgagacgtgtacctgcagggtcccatctgggccaagattcctcacacggacggcaacttccacccttcaccgctaatgggaggatttggactgaagcacccacctcctcagatcctgatcaagaacacgccggtacctgcggatcctccaacaacgttcagccaggcgaaattggcttccttcattacgcagtacagcaccggacaggtcagcgtggaaatcgagtgggagctgcagaaggagaacagcaaacgctggaacccagagattcagtacacttcaaactactacaaatctacaaatgtggactttgctgtcaatacagagggaacttattctgagcctcgccccattggtactcgttacctcacccgtaatctgtaattgctggttaatcaataaaccgtttgattcgtttcagttgaactttggtctctgcgaagggcgaattcgtttaaacctgcaggactagtccctttagtgagg

SEQ ID NO: 214 - DNA, 3172 bp, Artificial Sequence
  source: /note="Description of Artificial Sequence: Synthetic polynucleotide"
gattgaatttagcggccgcgaattcgcccttgctgcgtcaactggaccaatgagaactttcccttcaacgattgcgtcgacaagatggtgatctggtgggaggagggcaagatgaccgccaaggtcgtggagtccgccaaggccattctgggtggaagcaaggtgcgcgtggaccaaaagtgcaagtcatcggcccagatcgaccccacgcccgtgatcgtcacctccaacaccaacatgtgcgccgtgatcggcgggaacagcaccaccttcgagcaccagcagcccctgcaggaccgcatgttcaagttcgagctcacccgccgtctggagcacgactttggcaaggtgaccaagcaggaagtcaaagagttcttccgctgggctcaggatcacgtgactgaggtggcgcatgagttctacgtcagaaagggcggagccaccaaaagacccgcccccagtgacgcggatataagcgagcccaagcgggcctgcccctcagttgcggagccatcgacgtcagacgcggaagcaccggtggactttgcggacaggtaccaaaacaaatgttctcgtcacgcgggcatgcttcagatgctgtttccctgcaagacatgcgagagaatgaatcagaatttcaacgtctgcttcacgcacggggtcagagactgctcagagtgcctccccggcgcgtcagaatctcaacccgtcgtcagaaaaaagacgtatcagaaactgtgcgcgattcatcatctgctggggcgggcacccgagattgcgtgttcggcctgcgatctcgtcaacgtggacttggatgactgtgtttctgagcaataaatgacttaaaccaggtatggctgctgacggttatcttccagattggctcgaggacaacctctctgagggcattcgcgagtggtgggacctgaaacctggagcccccaagcccaaggccaaccagcagaagcaggacgacggccggggtctggtgcttcttggctacaagtacctcggacccttcaacggactcgacaagggggagcccgtcaatgcggcggacgcagcggccctcgagcacgacaaggcctacgaccagcagctcaaagcgggtgacaatccgtacctgcggtataaccacgccgacgccgagtttcaggagcgtctgcaagaagatacgtcttttgggggcaacctcgggcgagcagtcttccaggccaagaagcgggttctcgaacctctcggtctggttgaggaagctgctaagacggctcctggaaagaagagaccggtagaaccgtcacctcagcgttcccccgactcctccacgggcatcggcaagaaaggccagcagcccgctaaaaagagactgaactttggtcagactggcgactcagagtcagtccccgaccctcaaccaatcggagaaccaccagcaggcccctctggtctgggatctggtacaatggctgcaggcggtggcgctccaatggcagacaataacgaaggcgccgacggagtgggtagttcctcaggaaattggcattgcgattccacatggctgggcgacagagtcatcaccaccagcacccgaacctgggccctgcccacctacaacaaccacctctacaagcaaatatccaatgggacatcgggaggaagcaccaacgacaacacctacttcggctacagcaccccctgggggtattttgacttcaacagattccactgccacttctcaccacgtgactggcagcgactcatcaacaacaactggggattccggccaaaaagactcagcttcaagctcttcaacatccaggtcaaggaggtcacgcagaatgaaggcaccaagaccatcgccaataaccttaccagcacgattcaggtatttacggactcggaataccagctgccgtacgtcctcggctccgcgcaccagggctgcctgcctccgttcccggcggacgtcttcatgattccccagtacggctaccttacactgaacaatggaagtcaagccgtaggccgttcctccttctactgcctggaatattttccatctcaaatgctgcgaactggaaacaattttgaattcagctacaccttcgaggacgtgcctttccacagcggctacgcacacagccagagcttggaccgactgatgaatcctctcatcgaccagtacctgtactacttatccagaactcagtccacaggaggaactcaaggtacccagcaattgttattttctcaagctgggcctgcaaacatgtcggctcaggctaagaactggctacctggaccttgctaccggcagcagcgagtctctacgacactgtcgcaaaacaacaacagcaactttgcttggactggtgccaccaaatatcacctgaacggaagagactctttggtaaatcccggtgtcgccatggcaacccacaaggacgacgaggaacgcttcttcccgtcgagtggagtcctgatgtttggaaaacagggtgctggaagagacaatgtggactacagcagcgttatgctaaccagcgaagaagaaattaaaaccactaaccctgtagccacagaacaatacggtgtggtggctgacaacttgcagcaaaccaatacagggcctattgtgggaaatgtcaacagccaaggagccttacctggcatggtctggcagaaccgagacgtgtacctgcagggtcccatctgggccaagattcctcacacggacggcaacttccacccttcaccgctaatgggaggatttggactgaagcacccacctcctcagatcctgatcaagaacacgccggtacctgcggatcctccaacgacgttcagccaggcgaaattggcttccttcattacgcagtacagcaccggacaggtcagcgtggaaatcgagtgggagctgcagaaggagaacagcaaacgctggaacccagagattcagtacacttcaaactactacaaatctacaaatgtggactttgctgtcaatacagagggaacttattctgagcctcgccccattggtactcgttacctcacccgtaatctgtaattgctggttaatcaataaaccgtttgattcgtttcagttgaactttggtctctgcgaagggcgaattcgtttaaacctgcaggactagtccctttagtgagg

SEQ ID NO: 215 - DNA, 2208 bp, Artificial Sequence
  source: /note="Description of Artificial Sequence: Synthetic polynucleotide"
atggctgccgatggttatcttccagattggctcgaggacactctctctgaaggaataagacagtggtggaagctcaaacctggcccaccaccaccaaagcccgcagagcggcataaggacgacagcaggggtcttgtgcttcctgggtacaagtacctcggacccttcaacggactcgacaagggagagccggtcaacgaggcagacgccgcggccctcgagcacgacaaggcctacgaccggcagctcgaaagcggagacaacccgtacctcaagtacaaccacgccgacgcggagtttcaggagcgtcttaaagaagatacgtcttttgggggcaacctcggacgagcagtcttccaggcgaaaaagagggttcttgaacctctgggcctggttgaggagcctgttaaaacggctccgggaaaaaagaggccggtagagcactctcctgtggagccagactcctcctcgggaaccggaaaagcgggccagcagcctgcgagaaaaagattgaattttggtcagactggagacgcagactccgtacctgacccccagcctctcggacagccaccagcagccccctctggtctgggatctactacaatggcttcaggcagtggcgcaccagtggcagacaataacgagggtgccgatggagtgggtaattcctcaggaaattggcattgcgattcccaatggctgggcgacagagtcatcaccaccagcacccgaacctgggccctgcccacctacaacaaccacctctacaagcaaatctccagccaatcaggagcctcaaacgacaaccactactttggctacagcaccccctgggggtattttgacttcaacagattccactgccacttttcaccacgtgactggcaaagactcatcaacaacagctggggattccgacccaaaagactcaacttcaagctctttaacattcaagtcaaagaggtcacgcagaatgacggtacgacgacgattgccaataaccttaccagcacggttcaagtgtttaccgactcggagtaccagctcccgtacgtcctcggctcggcgcatcaaggatgcctcccgccgttcccagcagacgtctttatggtcccacagtatggatacctcaccctgaacaacgggagtcaggcggtaggacgctcttccttttactgcctggagtactttccttctcagatgctgcgtactggaaacaactttcagttcagctacacctttgaagacgttcccttccacagcagctacgctcacagccagagtctggatcggctgctgaatcctctgatcgaccagtacctatattatctgaacaagacacaatcaaatagtggaactcttcagcagtctcggctactgtttagccaagctggacccaccagcatgtctcttcaagctaaaaactggctgcctggaccttgctacagacagcagcgtctgtcaaagcaggcaaacgacaacaacaacagcaactttccctggactgcggctacaaagtatcatctaaatggccgggactcgttggttaatccaggaccagctatggccagccacaaagacgatgaagaaaagtttttccccatgcatggaaccctgatatttggtaaacaaggaacaaatgctaacgacgcggatttggacaatgtcatgattacagatgaagaagaaatccgcaccaccaatcccgtggctacggagcagtacggatatgtgtcaaataatttgcaaaactcaaatactggtccaactactggaactgtcaatcaccaaggagcgttacctggtatggtgtggcaggatcgagacgtgtacctgcagggacccatttgggccaagattcctcacacggacgggcactttcatccttctccactaatgggaggttttgggctcaaacacccgcctcctcagatcatgatcaaaaacactcccgttccagccaatcctcctacaaacttcagttcttccaagtttgcttctttcatcacacagtattccacggggcaggtcagcgtggagatcgagtgggagctgcagaaggagaacagcaaacgctggaatcccgaaattcagtatacttccaactacaacaaatctgttaatgtggactttactgtggacactaatggtgtgtattcagagcctcgccccattggcaccagatacccgactcgtaatctgtaa

SEQ ID NO: 216 - protein, 735 aa, Artificial Sequence
  source: /note="Description of Artificial Sequence: Synthetic polypeptide"
MAADGYLPDWLEDTLSEGIRQWWKLKPGPPPPKPAERHKDDSRGLVLPGYKYLGPFNGLDKGEPVNEADAAALEHDKAYDRQLESGDNPYLKYNHADAEFQERLKEDTSFGGNLGRAVFQAKKRVLEPLGLVEEPVKTAPGKKRPVEHSPVEPDSSSGTGKAGQQPARKRLNFGQTGDADSVPDPQPLGQPPAAPSGLGSTTMASGSGAPVADNNEGADGVGNSSGNWHCDSQWLGDRVITTSTRTWALPTYNNHLYKQISSQSGASNDNHYFGYSTPWGYFDFNRFHCHFSPRDWQRLINNSWGFRPKRLNFKLFNIQVKEVTQNDGTTTIANNLTSTVQVFTDSEYQLPYVLGSAHQGCLPPFPADVFMVPQYGYLTLNNGSQAVGRSSFYCLEYFPSQMLRTGNNFQFSYTFEDVPFHSSYAHSQSLDRLLNPLIDQYLYYLNKTQSNSGTLQQSRLLFSQAGPTSMSLQAKNWLPGPCYRQQRLSKQANDNNNSNFPWTAATKYHLNGRDSLVNPGPAMASHKDDEEKFFPMHGTLIFGKQGTNANDADLDNVMITDEEEIRTTNPVATEQYGYVSNNLQNSNTGPTTGTVNHQGALPGMVWQDRDVYLQGPIWAKIPHTDGHFHPSPLMGGFGLKHPPPQIMIKNTPVPANPPTNFSSSKFASFITQYSTGQVSVEIEWELQKENSKRWNPEIQYTSNYNKSVNVDFTVDTNGVYSEPRPIGTRYPTRNL

SEQ ID NO: 217 - DNA, 2208 bp, Artificial Sequence
  source: /note="Description of Artificial Sequence: Synthetic polynucleotide"
atggctgccgatggttatcttccagattggctcgaggacactctctctgaaggaataagacagtggtggaagctcaaacctggcccaccaccaccaaagcccgcagagcggcataaggacgacagcaggggtcttgtgcttcctgggtacaagtacctcggacccttcaacggactcgacaagggagagccggtcaacgaggcagacgccgcggccctcgagcacgacaaggcctacgaccggcagctcgacagcggagacaacccgtacctcaagtacaaccacgccgacgcggagtttcaggagcgtcttaaagaagatacgtcttttgggggcaacctcggacgagcagtcttccaggccaaaaagaggattcttgaacctctgggcctggttgaggaacctgttaagacggctccgggagaaaagaggccggtagagcactctcctgcggagccagactcctcctcgggaaccggaaaagcgggccagcagcctgcaagaaagagattgaattttggccagactggagacgcagactcagtacctgacccccagcctctcggacagccaccagcagccccctctggtctgggaactaatacgatggcttcaggcagtggcgcaccaatggcagacaataacgagggcgccgacggagtgggtaattcctcgggaaattggtattgcgattccacatggatgggcgacagagtcatcaccaccagcacccgcacctgggccctgcccacctacaacaaccatctgtacaagcaaatctccagccagtctggagccagcaacgacaaccactactttggctacagcaccccctgggggtattttgacttcaacagattccactgccacttctccccacgtgactggcaaagactcatcaacaacaactggggattccggcccaagagactcagcttcaagctctttaacattcaagtcaaagaggtcacgcagaatgacggtacgacgacgattgccaataaccttaccagcacggttcaggtgtttactgactcggagtaccagctcccgtacgtcctcggctcggcgcatcaaggatgcctcccgccgttcccagcagacgtcttcatggtgccacagtatggatacctcaccctgaacaacggcagtcaggcggtaggacgctcttccttttactgcctggagtactttccttctcagatgcttcgtaccggaaacaactttaccttcagctacacctttgaagacgttcctttccatagcagctacgctcacagccaaagtctggaccgtctcatgaatcctctcatcgaccagtacctgtattacttgagcagaacaaacactccaagcggaaccaccacgatgtccaggcttcagttttctcaggccggagcaagtgacattcgggaccagtctagaaactggcttcctggaccctgttaccgccagcagcgagtatcaaagacagctgcggacaacaacaacagtgattactcgtggactggagctaccaagtaccacctcaatggaagagactctctggtgaatccgggcccagctatggccagccacaaggacgatgaagaaaaatattttcctcagagcggggttctcatctttggaaaacaagactcgggaaaaactaatgtggacattgaaaaggttatgattacagacgaagaggaaatcaggaccaccaatcccgtggctacggagcagtatggttctgtatctaccaacctccagagcggcaacacacaagcagctacctcagatgtcaacacacaaggcgttcttccaggcatggtctggcaggacagagacgtgtacctgcaggggcccatctgggcaaagattccacacacggacggacattttcacccctctcccctcgtgggcggattcggacttaaacaccctcctccacaaattctcatcaagaacaccccggtacctgcgaatccttcgaccactttcagtgcggcaaagtttgcttccttcatcacacagtactccacggggcaggtcagcgtggagatcgagtgggagctgcagaaggagaacagcaaacgctggaatcccgaaattcagtacacttccaactacaacaaatctgttaatgtggactttactgtggacactaatggtgtgtattcagagcctcgccccattggcaccagatacctgactcgtaatctgtaa

SEQ ID NO: 218 - protein, 735 aa, Artificial Sequence
  source: /note="Description of Artificial Sequence: Synthetic polypeptide"
MAADGYLPDWLEDTLSEGIRQWWKLKPGPPPPKPAERHKDDSRGLVLPGYKYLGPFNGLDKGEPVNEADAAALEHDKAYDRQLDSGDNPYLKYNHADAEFQERLKEDTSFGGNLGRAVFQAKKRILEPLGLVEEPVKTAPGEKRPVEHSPAEPDSSSGTGKAGQQPARKRLNFGQTGDADSVPDPQPLGQPPAAPSGLGTNTMASGSGAPMADNNEGADGVGNSSGNWYCDSTWMGDRVITTSTRTWALPTYNNHLYKQISSQSGASNDNHYFGYSTPWGYFDFNRFHCHFSPRDWQRLINNNWGFRPKRLSFKLFNIQVKEVTQNDGTTTIANNLTSTVQVFTDSEYQLPYVLGSAHQGCLPPFPADVFMVPQYGYLTLNNGSQAVGRSSFYCLEYFPSQMLRTGNNFTFSYTFEDVPFHSSYAHSQSLDRLMNPLIDQYLYYLSRTNTPSGTTTMSRLQFSQAGASDIRDQSRNWLPGPCYRQQRVSKTAADNNNSDYSWTGATKYHLNGRDSLVNPGPAMASHKDDEEKYFPQSGVLIFGKQDSGKTNVDIEKVMITDEEEIRTTNPVATEQYGSVSTNLQSGNTQAATSDVNTQGVLPGMVWQDRDVYLQGPIWAKIPHTDGHFHPSPLVGGFGLKHPPPQILIKNTPVPANPSTTFSAAKFASFITQYSTGQVSVEIEWELQKENSKRWNPEIQYTSNYNKSVNVDFTVDTNGVYSEPRPIGTRYLTRNL

SEQ ID NO: 219 - DNA, 2209 bp, Artificial Sequence
  source: /note="Description of Artificial Sequence: Synthetic polynucleotide"
atggctgccgatggttatcctccagattggctcgaggacactctctctgaagggataagacagtggtggaagctcaaacctggcccaccaccaccaaagcccgcagagcggcataaggacgacagcaggggtcttgtgcttcctgggtacaagtacctcggacccttcaacggactcgacaagggggagccggtcaacgaggcagacgccgcggccctcgagcacgacaaggcctacgaccggcagctcgacagcggagacaacccgtacctcaagtacaaccacgccgacgcagagtttcaggagcgccttaaagaagatacgtcttttgggggcaacctcggacgagcagtcttccaggcgaaaaagagggttcttgaacctctgggcctggttgaggaacctgttaagacggctccgggaaaaaagaggccggtagagcactctcctgtggagccagactcctcctcgggaaccggaaaagcgggccagcggcctgcaagaaaaagattaaattttggtcagactggagacgcagactccgtacctgacccccagcctctcggacagccaccagcagccccctctggtctgggatctactacaatggctacaggcagtggcgcaccaatggcagacaataacgagggtgccgatggagtgggtaattcctcaggaaattggcattgcgattcccaatggctgggcgacagagtcatcaccaccagcacccgaacctgggccctgcccacatacaacaaccacctctacaagcaaatctccagccaatcaggagccagcaacgacaaccactactttggctacagcaccccctgggggtattttgacttcaacagattccactgccacttttcaccacgtgactggcaaagactcatcaacaacaactggggattccggcccaaaagactcaacttcaagctctttaatattcaagtcaaagaggtcacgcagaatgacggtacgacgacgattgccaataaccttaccagcacggttcaggtgtttactgactcggagtaccagctcccgtacgtcctgggctcggcgcatcaaggatgcctcccgccgtttccagcggacgtcttcatggtcccacagtatggatacctcaccctgaacaacgggagtcaggcggtaggacgctcttccttttactgcctggagtactttccttctcagatgctgcgtactggaaacaactttcagttcagctacacttttgaagacgtgcctttccacagcagctacgctcacagccagagtctggatcggctgatgaatcctctgatcgaccagtacctgtattatctgaacaagacacaaacaaatagtggaactcttcagcagtctcggctactgtttagccaagctggaccaaccaacatgtctcttcaagctaaaaactggctgcctggaccttgctacagacagcagcgtctgtcaaaacaggcaaacgacaacaacaacagcaactttccctggactgcagctacaaagtatcatctaaatggccgggactcgttggttaatccaggaccagctatggccagtcacaaggatgacgaagaaaagtttttccccatgcatggaaccctgatatttggtaaacaaggaacaaatgccaacgacgcggatttggaaaatgtcatgattacagatgaagaagaaatcagggccaccaatcccgtggctacggagcagtacgggactgtgtcaaataatttgcaaaactcaaacactggtccaactactggaactgtcaatcgccaaggagcgttacctggtatggtgtggcaggatcgagacgtgtacctgcagggacccatttgggccaagattcctcacaccgatggacactttcatccttctccactgatgggaggttttggactcaaacacccgcctcctcagatcatgatcaaaaacactcccgttccagccaatcctcccacaaacttcagttctgccaagtttgcttctttcatcacacagtattccacgggacaggtcagcgtggagatcgagtgggagctgcagaaggagaacagcaaacgctggaatcccgaaattcagtacacttccaactacaacaagtctgttaatgtggactttactgtggacactaatggtgtgtattcagagcctcgccccattggcaccagatacctgactcgtaatctgtaat

SEQ ID NO: 220 - protein, 735 aa, Artificial Sequence
  source: /note="Description of Artificial Sequence: Synthetic polypeptide"
MAADGYPPDWLEDTLSEGIRQWWKLKPGPPPPKPAERHKDDSRGLVLPGYKYLGPFNGLDKGEPVNEADAAALEHDKAYDRQLDSGDNPYLKYNHADAEFQERLKEDTSFGGNLGRAVFQAKKRVLEPLGLVEEPVKTAPGKKRPVEHSPVEPDSSSGTGKAGQRPARKRLNFGQTGDADSVPDPQPLGQPPAAPSGLGSTTMATGSGAPMADNNEGADGVGNSSGNWHCDSQWLGDRVITTSTRTWALPTYNNHLYKQISSQSGASNDNHYFGYSTPWGYFDFNRFHCHFSPRDWQRLINNNWGFRPKRLNFKLFNIQVKEVTQNDGTTTIANNLTSTVQVFTDSEYQLPYVLGSAHQGCLPPFPADVFMVPQYGYLTLNNGSQAVGRSSFYCLEYFPSQMLRTGNNFQFSYTFEDVPFHSSYAHSQSLDRLMNPLIDQYLYYLNKTQTNSGTLQQSRLLFSQAGPTNMSLQAKNWLPGPCYRQQRLSKQANDNNNSNFPWTAATKYHLNGRDSLVNPGPAMASHKDDEEKFFPMHGTLIFGKQGTNANDADLENVMITDEEEIRATNPVATEQYGTVSNNLQNSNTGPTTGTVNRQGALPGMVWQDRDVYLQGPIWAKIPHTDGHFHPSPLMGGFGLKHPPPQIMIKNTPVPANPPTNFSSAKFASFITQYSTGQVSVEIEWELQKENSKRWNPEIQYTSNYNKSVNVDFTVDTNGVYSEPRPIGTRYLTRNL

SEQ ID NO: 221 - DNA, 2208 bp, Artificial Sequence
  source: /note="Description of Artificial Sequence: Synthetic polynucleotide"
atggctgccgatggttatcttccagattggctcgaggacactctctctgaaggaataagacagtggtggaagctcaaacctggcccaccaccaccaaagcccgcagagcggcataaggacgacagcaggggtcttgtgcttcctgggtacaggtacctcggacccttcaacggactcgacaagggagagccggtcaacgaggcagacgccgcggccctcgagcacgacaaggcctacgaccggcagctcgacagcggagacaacccgtacctcaagtacaaccacgtcgacgcggagtttcaggagcgtcttaaagaagatacgtcttttgggggcaacctcggacgagcagtcttccaggccaaaaagaggattcttgaacctctgggcctggttgaggaacctgttaaggcggctccgggagaaaagaggccggtagagcactctcctgcggagccagactcctcctcgggaaccggaaaagcgggccagcagcctgcaagaaagagattgaattttggtcagactggagacgcagactcagtacctgacccccagcctctcggacagccaccagcagccccctctggtctgggaactaatacgatggcttcaggcagtggcgcaccaatggcagacaataacgagggcgccgacggagtgggtaattcctcgggaaattggcattgcgattccacatggatgggcgacagagtcatcaccaccagcacccgcacctgggccctgcccacctacaacaaccatctgtacaagcaaatctccagccagtctggagccagcaacgacaaccactactttggctacagcaccccctgggggcattttgacttcaacagattccactgccacttctccccacgtgactggcaaagactcatcaacaacaactggggattccggcccaagagactcagcttcaagctctttaacattcaagtcaaagaggtcacgcagaatgacggtacgacgacgattgccaataaccttaccagcacggttcaggtgtttactgactcggagtaccagctcccgtacgtcctcggctcggcgcatcaaggatgcctcccgccgttcccagcagacgtcttcatggtgccacagtatggatacctcaccctgaacaacggcagtcaggcggtaggacgctcttccttttactgcctggagtactttccttctcagatgcttcgtaccggaaacaactttaccttcagctacacctttgaagacgttcctttccatagcagctacgctcacagccaaagtctggaccgtctcatgaatcctctcatcgaccagtacctgtattacttgagcagaacaaacactccaagcggaaccaccacgatgtccaggcttcagttttctcaggccggagcaagtgacattcgggaccagtctagaaactggcttcctggaccctgttaccgccagcagcgagtatcaaagacagctgcggacaacaacaacagtgattactcgtggactggagctaccaagtaccacctcaatggaagagactctctggtgaatccgggcccagctatggccagccacaaggacgatgaagaaaaatattttcctcagagcggggttctcatctttggaaaacaagactcgggaaaaactaatgtggacattgaaaaggttatgattacagacgaagaggaaatcaggaccaccaatcccgtggctacggagcagtatggttctgtatctaccaacctccagagcggcaacacacaagcagctacctcagatgtcaacacacaaggcgttcttccaggcatggtctggcaggacagagacgtgtacctgcaggggcccatctgggcaaagattccacacacggacggacattttcacccctctccccccatgggcggattcggacttaaacaccctcctccacaaattctcatcaagaacaccccggtacctgcgaatccttcgaccactttcagtgcggcaaagtttgcttccttcatcacacagtactccacggggcaggtcagcgtggagatcgagtgggagctgcagaaggagaacagcaaacgctggaatcccgaaattcagtacacttccaactacaacaaatctgttaatgtggactttactgtggacactaatggtgtgtattcagagcctcgccccattggcgccagatacctgactcgtaatctgtaa

SEQ ID NO: 222 - protein, 735 aa, Artificial Sequence
  source: /note="Description of Artificial Sequence: Synthetic polypeptide"
MAADGYLPDWLEDTLSEGIRQWWKLKPGPPPPKPAERHKDDSRGLVLPGYRYLGPFNGLDKGEPVNEADAAALEHDKAYDRQLDSGDNPYLKYNHVDAEFQERLKEDTSFGGNLGRAVFQAKKRILEPLGLVEEPVKAAPGEKRPVEHSPAEPDSSSGTGKAGQQPARKRLNFGQTGDADSVPDPQPLGQPPAAPSGLGTNTMASGSGAPMADNNEGADGVGNSSGNWHCDSTWMGDRVITTSTRTWALPTYNNHLYKQISSQSGASNDNHYFGYSTPWGHFDFNRFHCHFSPRDWQRLINNNWGFRPKRLSFKLFNIQVKEVTQNDGTTTIANNLTSTVQVFTDSEYQLPYVLGSAHQGCLPPFPADVFMVPQYGYLTLNNGSQAVGRSSFYCLEYFPSQMLRTGNNFTFSYTFEDVPFHSSYAHSQSLDRLMNPLIDQYLYYLSRTNTPSGTTTMSRLQFSQAGASDIRDQSRNWLPGPCYRQQRVSKTAADNNNSDYSWTGATKYHLNGRDSLVNPGPAMASHKDDEEKYFPQSGVLIFGKQDSGKTNVDIEKVMITDEEEIRTTNPVATEQYGSVSTNLQSGNTQAATSDVNTQGVLPGMVWQDRDVYLQGPIWAKIPHTDGHFHPSPPMGGFGLKHPPPQILIKNTPVPANPSTTFSAAKFASFITQYSTGQVSVEIEWELQKENSKRWNPEIQYTSNYNKSVNVDFTVDTNGVYSEPRPIGARYLTRNL

SEQ ID NO: 223 - DNA, 2208 bp, Artificial Sequence
  source: /note="Description of Artificial Sequence: Synthetic polynucleotide"
atggctgccgatggttatcttccagattggctcgaggacaccctctctgaaggaataagacagtggtggaagctcaaacctggcccaccaccaccaaagcccgcagagcggcataaggacgacagcaggggtcttgtgcttcctgggtacaagtacctcggacccttcaacggactcgacaagggagagccggtcaacgaggcagacgccgcggccctcgagcacgacaaggcctacgaccggcagctcgacagcggagataacccgtacctcaagtacaaccacgccgacgcggagtttcaggagcgccttaaagaggatacgtcttttgggggcaacctcggacgagcagtcttccaggccaaaaagaggattcttgaacctctgggcctggttgaggaacctgttaagacggctccgggaaaaaagaggccggtagagcactctcctgcggagccagactcctcctcgggaaccggaaaagcgggccagcagcctgcaagaaagagattgaattttggtcagactggagacgcagactcagtacctgacccccggcctctcggacagccaccagcagccccctctggtctgggaactaatacgatggcttcaggcagtggcgcaccaatggcagacaataacgagggcgccgacggagtgggtaattcctcgggaaattggcattgcgattccacatggatgggcgacagagtcatcaccaccagcacccgcacctgggccctgcccacctacaacaaccatctgtacaagcaaatctccagccagtctggagccagcaacgacaaccactactttggctacagcaccccctgggggtattttgacttcaacagattccactgccacttctccccacgtgactggcaaagactcatcaacaacaactggggattccggcccaagagactcagcttcaagctctttaacattcaagtcaaagaggtcacgcagaatgacggtacgacgacgattgccaataaccttaccagcacggttcaggtgtttactgactcggagtaccagctcccgtacgtcctcggctcggcgcatcaaggatgcctcccgccgttcccagcagacgtcttcatggtgccacagtatggatacctcaccctgaacaacggcagtcaggcggtaggacgctcttccttttactgcctggagtactttccttctcagatgcttcgtaccggaaacaactttaccttcagctacacctttgaagacgttcctttccatagcagctacgctcacagccaaagtctggaccgtctcatgaatcctctcatcgaccagtacctgtattacttgagcagaacaaacactccaagcggaaccaccacgatgtccaggcttcagttttctcaggccggagcaagtgacattcgggaccagtctagaaactggcttcctggaccctgttaccgccagcagcgagtatcaaagacagctgcggacaacaacaacagtgattactcgtggactggagctaccaagtaccacctcaatggaagagactctctggtgaatccgggcccagctatggccagccacaaggacgatgaagaaaaatattttcctcagagcggggttctcatctttggaaaacaagactcgggaaaaactaatgtggacattgaaaaggttatgattacagacgaagaggaaatcaggaccaccaatcccgtggctacggagcagtatggttctgtatctaccaacctccagagcggcaacacacaagcagctacctcagatgtcaacacacaaggcgttcttccaggcatggtctggcaggacagagacgtgtacctgcaggggcccatctgggcaaagattccacacacggacggacattttcacccctctcccctcatgggcggattcggacttaaacaccctcctccacaaattctcatcaagaacaccccggtacctgcgaatccttcgaccactttcagtgcggcaaagtttgcttccttcatcacacagtactccacggggcaggtcagcgtggagatcgagtgggagctgcagaaggagaacagcaaacgctggaatcccgaaattcagtacacttccaactacaacaaatctgttaatgtggactttactgtggacactaatggtgtgtattcagagcctcgccccattggcaccagatacctgactcgtaatctgtaa

SEQ ID NO: 224 - protein, 735 aa, Artificial Sequence
  source: /note="Description of Artificial Sequence: Synthetic polypeptide"
MAADGYLPDWLEDTLSEGIRQWWKLKPGPPPPKPAERHKDDSRGLVLPGYKYLGPFNGLDKGEPVNEADAAALEHDKAYDRQLDSGDNPYLKYNHADAEFQERLKEDTSFGGNLGRAVFQAKKRILEPLGLVEEPVKTAPGKKRPVEHSPAEPDSSSGTGKAGQQPARKRLNFGQTGDADSVPDPRPLGQPPAAPSGLGTNTMASGSGAPMADNNEGADGVGNSSGNWHCDSTWMGDRVITTSTRTWALPTYNNHLYKQISSQSGASNDNHYFGYSTPWGYFDFNRFHCHFSPRDWQRLINNNWGFRPKRLSFKLFNIQVKEVTQNDGTTTIANNLTSTVQVFTDSEYQLPYVLGSAHQGCLPPFPADVFMVPQYGYLTLNNGSQAVGRSSFYCLEYFPSQMLRTGNNFTFSYTFEDVPFHSSYAHSQSLDRLMNPLIDQYLYYLSRTNTPSGTTTMSRLQFSQAGASDIRDQSRNWLPGPCYRQQRVSKTAADNNNSDYSWTGATKYHLNGRDSLVNPGPAMASHKDDEEKYFPQSGVLIFGKQDSGKTNVDIEKVMITDEEEIRTTNPVATEQYGSVSTNLQSGNTQAATSDVNTQGVLPGMVWQDRDVYLQGPIWAKIPHTDGHFHPSPLMGGFGLKHPPPQILIKNTPVPANPSTTFSAAKFASFITQYSTGQVSVEIEWELQKENSKRWNPEIQYTSNYNKSVNVDFTVDTNGVYSEPRPIGTRYLTRNL

SEQ ID NO: 225 - DNA, 2208 bp, Artificial Sequence
  source: /note="Description of Artificial Sequence: Synthetic polynucleotide"
atggctgccgatggttatcttccagattggctcgaggacactctctctgaaggaataagacagtggtggaagctcaaacctggcccaccaccaccaaagcccgcagagcggcataaggacgacagcaggggtcttgtgcttcctgggtacaagtacctcggacccttcaacggactcgacaagggagagccggtcaacgaggcagacgccgcggccctcgagcacgacaaggcctacgaccggcagctcgacagcggagacaacccgtacctcaagtacaaccacgccgacgcggagtttcaggagcgccttaaaggagatacgtcttttgggggcaacctcggacgagcagtcttccaggccaaaaagaggattcttgaacctctgggcctggttgaggaacctgttaagacggctccgggaaaaaagaggccggtagagcactctcctgcggagccagactcctcctcgggaaccggaaaagcgggccagcagcctgcaagaaagagattgaattttggtcagactggagacgcagactcagtacctgacccccagcctctcggacagccaccagcagccccctctggtctgggaactaatacgatggcttcaggcagtggcgcaccaatggcagacaataacgagggcgccgacggagtgggtaattcctcgggaaattggcattgcgattccacatggatgggcggcagagtcatcaccaccagcacccgcacctgggccctgcccacctacaacaaccatctgtacaagcaaatctccagccagtctggagccagcaacgacaaccactactttggctacagcaccccctgggggtattttgacttcaacagattccactgccacttctccccacgtgactggcaaagactcatcaacaacaactggggattccggcccaagagactcagcttcaagctctttaacattcaagtcaaagaggtcacgcagaatgacggtacgacgacgattgccaataaccttaccagcacggttcaggtgtttactgactcggagtaccagctcccgtacgtcctcggctcggcgcatcaaggatgcctcccgccgttcccagcagacgtcttcatggtgccacagtatggatacctcaccctgaacaacggcagtcaggcggtaggacgctcttccttttactgcctggagtactttccttctcagacgcttcgtaccggaaacaactttaccttcagctacacctttgaagacgttcctttccatagcagctacgctcacagccaaagtctggaccgtctcatgaatcctctcatcgaccagtacctgtattacttgagcagaacaaacactccaagcggaaccaccacgatgtccaggcttcagttttctcaggccggagcaagtgacattcgggaccagtctagaaactggcttcctggaccctgttaccgccagcagcgagtatcaaagacagctgcggacaacaacaacagtgattactcgtggactggagctaccaagtaccacctcaatggaagagactctctggtgaatccgggcccagctatggccagccacaaggacgatgaagaaaaatattttcctcagagcggggttctcatctttggaaaacaagactcgggaaaaactaatgtggacattgaaaaggttatgattacagacgaagaggaaatcaggaccaccaatcccgtggctacggagcagtatggttctgtatctaccaacctccagagcggcaacacacaagcagctacctcagatgtcaacacacaaggcgttcttccaggcatggtctggcaggacagagacgtgtacctgcaggggcccatctgggcaaagattccacacacggacggacattttcacccctctcccctcatgggcggattcggacttaaacaccctcctccacaaattctcatcaagaacaccccggtacctgcgaatccttcgaccactttcagtgcggcaaagtttgcttccttcatcacacagtactccacggggcaggtcagcgtggagatcgagtgggagctgcagaaggagaacagcaaacgctggaatcccgaaattcagtacacttccaactacaacaaatctgttaatgtggactttactgtggacactaatggtgtgtattcagagcctcgccccattggcaccagatacctgactcgtaatctgtaa

SEQ ID NO: 226 - protein, 735 aa, Artificial Sequence
  source: /note="Description of Artificial Sequence: Synthetic polypeptide"
MAADGYLPDWLEDTLSEGIRQWWKLKPGPPPPKPAERHKDDSRGLVLPGYKYLGPFNGLDKGEPVNEADAAALEHDKAYDRQLDSGDNPYLKYNHADAEFQERLKGDTSFGGNLGRAVFQAKKRILEPLGLVEEPVKTAPGKKRPVEHSPAEPDSSSGTGKAGQQPARKRLNFGQTGDADSVPDPQPLGQPPAAPSGLGTNTMASGSGAPMADNNEGADGVGNSSGNWHCDSTWMGGRVITTSTRTWALPTYNNHLYKQISSQSGASNDNHYFGYSTPWGYFDFNRFHCHFSPRDWQRLINNNWGFRPKRLSFKLFNIQVKEVTQNDGTTTIANNLTSTVQVFTDSEYQLPYVLGSAHQGCLPPFPADVFMVPQYGYLTLNNGSQAVGRSSFYCLEYFPSQTLRTGNNFTFSYTFEDVPFHSSYAHSQSLDRLMNPLIDQYLYYLSRTNTPSGTTTMSRLQFSQAGASDIRDQSRNWLPGPCYRQQRVSKTAADNNNSDYSWTGATKYHLNGRDSLVNPGPAMASHKDDEEKYFPQSGVLIFGKQDSGKTNVDIEKVMITDEEEIRTTNPVATEQYGSVSTNLQSGNTQAATSDVNTQGVLPGMVWQDRDVYLQGPIWAKIPHTDGHFHPSPLMGGFGLKHPPPQILIKNTPVPANPSTTFSAAKFASFITQYSTGQVSVEIEWELQKENSKRWNPEIQYTSNYNKSVNVDFTVDTNGVYSEPRPIGTRYLTRNL

SEQ ID NO: 227 - DNA, 2208 bp, Artificial Sequence
  source: /note="Description of Artificial Sequence: Synthetic polynucleotide"
atggctgccgatggttatcttccagattggctcgaggacactctctctgaaggaataagacagtggtggaagctcaaacctggcccaccaccaccaaagcccgcagagcggcataaggacgacagcaggggtcttgtgcttcctgggtacaagtacctcggacccttcaacggactcgacaagggagagccggtcaacgaggcagacgccgcggccctcgagcacgacaaggcctacgaccggcagctcgacagcggagacaacccgtacctcaagtacaaccacgccgacgcggagtttcaggagcgtcttaaagaagatacgtcttttgggggcaacctcggacgagcagtcttccaggccaaaaagaggattcttgaacctctgggcctggttgaggaacctgttaagacggctccgggaaaaaagaggccggtagagcactctcctgcggagccagactcctcctcgggaaccggaaaagcgggccagcagcctgcaagaaagagattgaattttggtcagactggagacgcagactcagtacctgacccccagcctctcggacagccaccagcagccccctctggtctgggaactaatacgatggcttcaggcagtggcgcaccaatggcagacaataacgagggcgccgacggagtgggtaattcctcgggaaattggcattgcgattccacatggatgggcgacagagtcatcaccaccagcacccgcacctgggccctgcccacctgcaacaaccatctgtacaagcaaatctccagccagtctggagccagcaacgacaaccactactttggctacagcaccccctgggggtattttgacttcaacagattccactgccacttctccccacgtgactggcaaagactcatcaacaacaactggggattccggcccaagagactcagcttcaagctctttaacattcaagtcaaagaggtcacgcagaatgacggtacgacgacgattgccaataaccttaccagcacggttcaggtgtttactgactcggagtaccagctcccgtacgtcctcggctcggcgcatcaaggatgcctcccgccgttcccagcagacgtcttcatggtgccacagtatggatacctcaccctgaacaacggcagtcaggcggtaggacgctcttccttttactgcctggagtattttccttctcagatgcttcgtaccggaaacaactttaccttcagctacacctttgaagacgttcctttccatagcagctacgctcacagccaaagtctggaccgtctcatgaatcctctcatcgaccagtacctgtattacttgagcagaacaaacactccaagcggaaccaccacgatgtccaggcttcagttttctcaggccggagcaagtgacattcgggaccagtctagaaactggcttcctggaccctgttaccgccagcagcgagtatcaaagacagctgcggacaacaacaacagtgattactcgtggactggagctaccaagtaccacctcaatggaagagactctctggtgaatccgggcccagctatggccagccacaaggacgatgaagaaaaatattttcctcagagcggggttctcatctttggaaaacaagactcgggaaaaactaatgtggacattgaaaaggttatgattacagacgaagaggaaatcaggaccaccaatcccgtggctacggagcagtatggttctgtatctacctacctccagagcggcaacacacaagcagctacctcagatgtcaacacacaaggcgttcttccaggcatggtctggcaggacagagacgtgtacctgcgggggcccatctgggcaaagattccacacacggacggacattttcacccctctcccctcatgggcggatttggacttaaacaccctcctccacaaattctcatcaagaacaccccggtacctgcgaatccttcgaccactttcagtgcggcaaagtttgcttccttcatcacacagtactccacggggcaggtcagcgtggagatcgagtgggagctgcagaaggagaacagcaaacgctggaatcccgaaattcagtacacttccaactacaacaaatctgttaatgtggactttactgtggacactaatggtgtgtattcagagcctcgccccattggcaccagatacctgactcgtaatctgtaa

SEQ ID NO: 228 - protein, 735 aa, Artificial Sequence
  source: /note="Description of Artificial Sequence: Synthetic polypeptide"
MAADGYLPDWLEDTLSEGIRQWWKLKPGPPPPKPAERHKDDSRGLVLPGYKYLGPFNGLDKGEPVNEADAAALEHDKAYDRQLDSGDNPYLKYNHADAEFQERLKEDTSFGGNLGRAVFQAKKRILEPLGLVEEPVKTAPGKKRPVEHSPAEPDSSSGTGKAGQQPARKRLNFGQTGDADSVPDPQPLGQPPAAPSGLGTNTMASGSGAPMADNNEGADGVGNSSGNWHCDSTWMGDRVITTSTRTWALPTCNNHLYKQISSQSGASNDNHYFGYSTPWGYFDFNRFHCHFSPRDWQRLINNNWGFRPKRLSFKLFNIQVKEVTQNDGTTTIANNLTSTVQVFTDSEYQLPYVLGSAHQGCLPPFPADVFMVPQYGYLTLNNGSQAVGRSSFYCLEYFPSQMLRTGNNFTFSYTFEDVPFHSSYAHSQSLDRLMNPLIDQYLYYLSRTNTPSGTTTMSRLQFSQAGASDIRDQSRNWLPGPCYRQQRVSKTAADNNNSDYSWTGATKYHLNGRDSLVNPGPAMASHKDDEEKYFPQSGVLIFGKQDSGKTNVDIEKVMITDEEEIRTTNPVATEQYGSVSTYLQSGNTQAATSDVNTQGVLPGMVWQDRDVYLRGPIWAKIPHTDGHFHPSPLMGGFGLKHPPPQILIKNTPVPANPSTTFSAAKFASFITQYSTGQVSVEIEWELQKENSKRWNPEIQYTSNYNKSVNVDFTVDTNGVYSEPRPIGTRYLTRNL

SEQ ID NO: 229 - DNA, 2208 bp, Artificial Sequence; identical to SEQ ID NO: 223
  source: /note="Description of Artificial Sequence: Synthetic polynucleotide"

SEQ ID NO: 230 - protein, 735 aa, Artificial Sequence; identical to SEQ ID NO: 224
  source: /note="Description of Artificial Sequence: Synthetic polypeptide"

SEQ ID NO: 231 - DNA, 2208 bp, Artificial Sequence
  source: /note="Description of Artificial Sequence: Synthetic polynucleotide"
atggctgccgatggttatcttccagattggctcgaggacactctctctgaaggaataagacagtggtggaagctcaaacctggcccaccaccaccaaagcccgcagagcggcataaggacggcagcaggggtcttgtgcttcctgggtacaagtacctcggacccttcaacggactcgacaagggagagccggtcaacgaggcagacgccgcggccctcgagcacgacaaggcctacgaccggcagctcaacagcggagacaacccgtacctcaagtacaaccacgccgacgcggagtttcaggagcgccttaaagaagatacgtcttttgggggcaacctcggacgagcagtcttccaggcaaaaaagagggttcttgaacctctgggcctggttgaggagcctgttaaaacggctccgggaaaaaagagaccggtagagcactctcctgcggagccagactcctcctcgggaaccggaaaagcgggccagcagcctgcaagaaagagattgaattttggtcagactggagacgcagactccgtacctgacccccagcctctcggacagccaccagcagccccctctggtctgggatctactacaatggctacaggcagtggcgcaccaatggcagacaataacgagggtgccgatggagtgggtaattcctcaggaaattggcattgcgattcccaatggctgggcgacagagtcatcaccacaagcactcgaacctgggccctgcccacctacaacaaccacctctacaagcaaatctccagccaatcaggagcctcaaacgacaaccactattttggctacagcaccccttgggggtattttgacttcaacagattccactgccacttttcaccacgtgactggcaaagactcatcaacaacaactggggattccgacccaagagactcaacttcaagctctttaacattcaagtcaaagaggtcacgcagaatgacggtacgacgacgattgccaataaccttaccagcacggttcaggtgtttactgactcggagtaccagctcccgtacgtcctcggctcggcgcatcaaggatgcctcccgccgttcccagcggacgtcttcatggtcccacagtatggatacctcaccctgaacaacgggagtcaggcggtaggacgctctcccttttactgcctggagtactttccttctcagatgctgcgtactggaaacaactttcagttcagctacacttttgaagacgtgcctttccacagcagctacgctcacagccagagtctggatcggctgatgaatcctctgatcgaccagtacctgtattatctgaacaagacacaaacaaatagtggaactcttcagcagtctcggctactgtttagccaagctggacccaccaacatgtctcttcaagctaaaaactggctgcctggaccttgctacagacagcagcgtctgtcaaagcaggcaaacgacaacaacaacagcaactttccctggactgcagctacaaagtatcatctaaatggccgggactcgttggttaatccaggaccagctatggccagtcacaaggatgacgaagaaaagtttttccccatgcatggaaccctgatatttggtaaacaaggaacaaatgccaacgacgcggatttggaaaatgtcatgattacagatgaagaagaaatcaggaccaccaatcccgtggctacggagcagtacgggactgtgtcaaataatttgcaaaactcaaacactggtccaactactggaactgtcaatcaccaaggagcgttacctggtatggtgtggcaggatcgagatgtgtaccttcagggacccatttgggccaagattcctcacaccgatggacactttcatccttctccactgatgggaggttttggactcaaacacccgcctcctcagattatgatcaaaaacactcccgttccagccaatcctcctacaaacttcagttctgccaagtttgcttctttcatcacacagtattccacggggcaggtcagcgtggagatcgagtgggagctgcagaaggagaacagcaaacgctggaatcccgaaattcagtacacttccaactacaacaaatctgttaatgtggactttactgtggacaataatggcgtgtactcagagcctcgccccattggcaccagatacctgactcgtaatctgtaa

SEQ ID NO: 232 - protein, 735 aa, Artificial Sequence
  source: /note="Description of Artificial Sequence: Synthetic polypeptide"
MAADGYLPDWLEDTLSEGIRQWWKLKPGPPPPKPAERHKDGSRGLVLPGYKYLGPFNGLDKGEPVNEADAAALEHDKAYDRQLNSGDNPYLKYNHADAEFQERLKEDTSFGGNLGRAVFQAKKRVLEPLGLVEEPVKTAPGKKRPVEHSPAEPDSSSGTGKAGQQPARKRLNFGQTGDADSVPDPQPLGQPPAAPSGLGSTTMATGSGAPMADNNEGADGVGNSSGNWHCDSQWLGDRVITTSTRTWALPTYNNHLYKQISSQSGASNDNHYFGYSTPWGYFDFNRFHCHFSPRDWQRLINNNWGFRPKRLNFKLFNIQVKEVTQNDGTTTIANNLTSTVQVFTDSEYQLPYVLGSAHQGCLPPFPADVFMVPQYGYLTLNNGSQAVGRSPFYCLEYFPSQMLRTGNNFQFSYTFEDVPFHSSYAHSQSLDRLMNPLIDQYLYYLNKTQTNSGTLQQSRLLFSQAGPTNMSLQAKNWLPGPCYRQQRLSKQANDNNNSNFPWTAATKYHLNGRDSLVNPGPAMASHKDDEEKFFPMHGTLIFGKQGTNANDADLENVMITDEEEIRTTNPVATEQYGTVSNNLQNSNTGPTTGTVNHQGALPGMVWQDRDVYLQGPIWAKIPHTDGHFHPSPLMGGFGLKHPPPQIMIKNTPVPANPPTNFSSAKFASFITQYSTGQVSVEIEWELQKENSKRWNPEIQYTSNYNKSVNVDFTVDNNGVYSEPRPIGTRYLTRNL

SEQ ID NO: 233 - DNA, 2208 bp, Artificial Sequence
  source: /note="Description of Artificial Sequence: Synthetic polynucleotide"
atggctgccgatggttatcttccagattggctcgaggacactctctctgaaggaataagacagtggtggaagctcaaacctggcccaccaccaccaaagcccgcagagcggcataaggacgacagcaggggtcttgtgcttcctgggtacaagtacctcggacccttcaacggactcgacaagggagagccggtcaacgaggcagacgccgcggccctcgagcacgacaaggcctacgaccggcagctcgacagcggagacaacccgtacctcaagtacaaccacgccgacgcggagtttcaggagcgtcttaaagaagatacgtcttttgggggcaacctcggacgagcagtcttccaggccaaaaagaggattcttgaacctctgggcctggttgaggaacctgttaagacggctccgggaaaaaagaggccggtagagcactctcctgcggagccagactcctcctcgggaaccggaaaagcgggccagcagcctgcaagaaagagattgaattttggtcagactggagacgcagactcagtacctgacccccagcctctcggacagccaccagcagccccctctggtctgggaactaatacgatggcttcaggcagtggcgcaccaatggcagacaataacgagggcgccgacggagtgggtaattcctcgggaaattggcattgcgattccacatggatgggcgacagagtcatcaccaccagcacccgcacctgggccctgcccacctacaacaaccatctgtacaagcaaatctccagccagtctggagccagcaacgacaaccactactttggctacagcaccccctgggggtattttgacttcaacagattccactgccacttctccccacgtgactggcaaagactcatcaacaacaactggggattccggcccaagagactcagcttcaagctctttaacattcaagtcaaagaggtcacgcagaatgacggtacgacgacgattgccaataaccttaccagcacggttcaggtgtttactgactcggagtaccagctcccgtacgtcctcggctcggcgcatcaaggatgcctcccgccgttcccagcagacgtcttcatggtgccacagtatggatacctcaccctgaacaacggcagtcaggcggtaggacgctcttccttttactgcctggagtactttccttctcagatgcttcgtaccggaaacaactttaccttcagctacacctttgaagacgttcctttccatagcagctacgctcacagccaaagtctggaccgtctcatgaatcctctcatcgaccagtacctgtattacttgagcagaacaaacactccaagcggaaccaccacgatgtccaggcttcagttttctcaggccggagcaagtgacattcgggaccagtctagaaactggcttcctggaccctgttaccgccagcagcgagtatcaaagacagctgcggacaacaacaacagtgattactcgtggactggagctaccaagtaccacctcaatggaagagactctctggtgaatccgggcccagctatggccagccacaaggacgatgaagaaaaatattttcctcagagcggggttctcatctttggaaaacaagactcgggaaaaactaatgtggacattgaaaaggttatgattacagacgaagaggaaatcaggaccaccaatcccgtggctacggagcagtatggttctgtatctaccaacctccagagcggcaacacacaagcagctacctcagatgtcaacacacaaggcgttcttccaggcatggtctggcaggacagagacgtgtacctgcaggggcccatctgggcaaagattccacacacggacggacattttcacccctctcccctcatgggcggattcggacttaaacaccctcctccacaaattctcatcaagaacaccccggtacctgcgaatccttcgaccactttcagtgcggcaaagtttgcttccttcatcacacagtactccacggggcaggtcagcgtggagatcgagtgggagctgcagaaggagaacagcaaacgctggaatcccgaaattcagtacacttccaactacaacaaatctgttaatgtggactttactgtggacactaatggtgtgtattcagagcctcgccccattggcaccagatacctgactcgtaatctgtaa

SEQ ID NO: 234 - protein, 735 aa, Artificial Sequence
  source: /note="Description of Artificial Sequence: Synthetic polypeptide"
MAADGYLPDWLEDTLSEGIRQWWKLKPGPPPPKPAERHKDDSRGLVLPGYKYLGPFNGLDKGEPVNEADAAALEHDKAYDRQLDSGDNPYLKYNHADAEFQERLKEDTSFGGNLGRAVFQAKKRILEPLGLVEEPVKTAPGKKRPVEHSPAEPDSSSGTGKAGQQPARKRLNFGQTGDADSVPDPQPLGQPPAAPSGLGTNTMASGSGAPMADNNEGADGVGNSSGNWHCDSTWMGDRVITTSTRTWALPTYNNHLYKQISSQSGASNDNHYFGYSTPWGYFDFNRFHCHFSPRDWQRLINNNWGFRPKRLSFKLFNIQVKEVTQNDGTTTIANNLTSTVQVFTDSEYQLPYVLGSAHQGCLPPFPADVFMVPQYGYLTLNNGSQAVGRSSFYCLEYFPSQMLRTGNNFTFSYTFEDVPFHSSYAHSQSLDRLMNPLIDQYLYYLSRTNTPSGTTTMSRLQFSQAGASDIRDQSRNWLPGPCYRQQRVSKTAADNNNSDYSWTGATKYHLNGRDSLVNPGPAMASHKDDEEKYFPQSGVLIFGKQDSGKTNVDIEKVMITDEEEIRTTNPVATEQYGSVSTNLQSGNTQAATSDVNTQGVLPGMVWQDRDVYLQGPIWAKIPHTDGHFHPSPLMGGFGLKHPPPQILIKNTPVPANPSTTFSAAKFASFITQYSTGQVSVEIEWELQKENSKRWNPEIQYTSNYNKSVNVDFTVDTNGVYSEPRPIGTRYLTRNL

SEQ ID NO: 235 - DNA, 2208 bp, Artificial Sequence
  source: /note="Description of Artificial Sequence: Synthetic polynucleotide"
atggctgccgatggttatcttccagattggctcgaggacactctctctgaaggaataagacagtggtggaagctcaaacctggcccaccaccaccaaagcccgcagagcggcataaggacgacagcaggggtcttgtgcttcctgggtacaagtacctcggacccttcaacggactcgacaagggagagccggtcaacgaggcagacgccgcggccctcgagcacgacaaggcctacgaccggcagctcgacagcggagacaacccgtacctcaagtacaaccacgccgacgcggagtttcaggagcgtcttaaagaagatacgtcttttgggggcaacctcggacgagcagtcttccaggccaaaaagaggattcttgaacctctgggcctggttgaggaacctgttaagacggctccgggaaaaaagaggccggtagagcactctcctgcggagccagactcctcctcgggaaccggaaaagcgggccagcagcctgcaagaaagagattgaattttggtcagactggagacgcagactcagtacctgacccccagcctctcggacagccaccagcagccccctctggtctgggaactaatacgatggcttcaggcagtggcgcaccaatggcagacaataacgagggcgccgacggagtgggtaattcctcgggaaattggcattgcgattccacatggatgggcgacagagtcatcaccaccagcacccgcacctgggccctgcccacctacaacaaccatctgtacaagcaaatctccagccagtctggagccagcaacgacaaccactactttggctacagcaccccctgggggtatttcgacttcaacagattccactgccacttctccccacgtgactggcaaagactcatcaacaacaactggggattccggcccaagagactcagcttcaagctctttaacattcaagtcaaagaggtcacgcagaatgacggtacgacgacgattgccaataaccttaccagcacggttcaggtgtttactgactcggggtaccagctcccgtacgtcctcggctcggcgcatcaaggatgccttccgccgttcccagcagacgtcttcatggtgccacagtatggatacctcaccctgaacaacggcagtcaggcggtaggacgctcttccttttactgcctggagtactttccttctcagatgcttcgtaccggaaacaactttaccttcagctacacctttgaagacgttcctttccatagcagctacgctcacggccaaagtctggaccgtctcatgaatcctctcatcgaccagtacctgtattacttgagcagaacaaacactccaagcggaaccaccacgatgtccaggcttcagttttctcaggccggagcaagtgacgttcgggaccagtctagaaactggcttcctggaccctgttaccgccagcagcgagtatcaaagacagctgcggacaacaacaacagtgattactcgtggactggagctaccaagtaccacctcaatggaagagactctctggtgaatccgggcccagctatggccagccacaaggacgatgaagaaaaatattttcctcagagcggggttctcgtctttggaaaacaagactcgggaaaaactaatgtggacattgaaaaggttatgattacagacgaagaggaaatcaggaccaccaatcccgcggctacggagcagtatggttctgtatctaccaacctccagagcggcaacacacaagcagctacctcagatgtcaacacacaaggcgttcttccaggcatggtctggcaggacagagacgtgtacctgcaggggcccatctgggcaaagattccacacacggacggacattttcacccctctcccctcatgggcggattcggacttaaacaccctcctccacaaattctcatcaagaacaccccggtacctgcgaatccttcgaccactttcagtgcggcaaagtttgtttccttcatcacacagtactccacggggcaggtcagcgtggagatcgagtgggagctgcagaaggagaacagcaaacgctggaatcccgaaattcagtacacttccaactacaacaaatctgttaatgtggactttactgtggacactaatggtgtgtattcagagcctcgccccattggcaccagatacctgactcgtaatctgtaa

SEQ ID NO: 236 - protein, 735 aa, Artificial Sequence
  source: /note="Description of Artificial Sequence: Synthetic polypeptide"
MAADGYLPDWLEDTLSEGIRQWWKLKPGPPPPKPAERHKDDSRGLVLPGYKYLGPFNGLDKGEPVNEADAAALEHDKAYDRQLDSGDNPYLKYNHADAEFQERLKEDTSFGGNLGRAVFQAKKRILEPLGLVEEPVKTAPGKKRPVEHSPAEPDSSSGTGKAGQQPARKRLNFGQTGDADSVPDPQPLGQPPAAPSGLGTNTMASGSGAPMADNNEGADGVGNSSGNWHCDSTWMGDRVITTSTRTWALPTYNNHLYKQISSQSGASNDNHYFGYSTPWGYFDFNRFHCHFSPRDWQRLINNNWGFRPKRLSFKLFNIQVKEVTQNDGTTTIANNLTSTVQVFTDSGYQLPYVLGSAHQGCLPPFPADVFMVPQYGYLTLNNGSQAVGRSSFYCLEYFPSQMLRTGNNFTFSYTFEDVPFHSSYAHGQSLDRLMNPLIDQYLYYLSRTNTPSGTTTMSRLQFSQAGASDVRDQSRNWLPGPCYRQQRVSKTAADNNNSDYSWTGATKYHLNGRDSLVNPGPAMASHKDDEEKYFPQSGVLVFGKQDSGKTNVDIEKVMITDEEEIRTTNPAATEQYGSVSTNLQSGNTQAATSDVNTQGVLPGMVWQDRDVYLQGPIWAKIPHTDGHFHPSPLMGGFGLKHPPPQILIKNTPVPANPSTTFSAAKFVSFITQYSTGQVSVEIEWELQKENSKRWNPEIQYTSNYNKSVNVDFTVDTNGVYSEPRPIGTRYLTRNL

SEQ ID NO: 237 - DNA, 2208 bp, Artificial Sequence
  source: /note="Description of Artificial Sequence: Synthetic polynucleotide"
atggctgccgatggttatcttccagattggctcgaggacactctctctgaaggaataagacagtggtggaaactcaaacctggcccaccaccaccaaagcccgcagagcggcataaggacgacagcaggggtcttgtgcttcctgggtacaagtacctcggacccttcaacggactcgacaagggagagccggtcaacgaggcagacgccgcggccctcgagcacgacaaggcctacgaccggcagctcgacagcggagacaacccgtacctcaagtacaaccacgccgacgcggagtttcaggagcgccttaaagaagatacgtcttttgggggcaacctcggacgagcagtcttccaggcaaaaaagagggttctggaacctctgagcctggttgaggagcctgttaagacggctccgggaaaaaagaggccggtagagcactctcccgcagagccagattcctcctccggaactggaaagtcgggcaaccagcctgcaagaaagagattgaatttcggtcagactggagactcagactccgtacctgacccccagcctctcggacagccaccagcagccccctctggtctgggaactaatacgatggctacaggcagtggcgcaccaatggcagacaataacgagggcgccgacggagtgggtaattcctcgggaaattggcattgcgattccacatggatgggcgacagagtcatcaccaccagcacccgaacctgggccctgcccacctacaacaaccatctgtacaagcaaatatccagccagtctggagccagcaacgacaatcactactttggctacagcaccccctgggggtattttgacttcaacagattccactgccacttttcaccacgtgactggcaaagactcatcaacaacaactggggattccgacccaagagactcaacttcaagctctttaacattcaagtcaaagaggtcacgcagaatgacggtacgacgacgattgccaataaccttaccagcacggttcaggtgtttactgactcggagtaccagctcccgtacgtcctcggctcggcgcatcaaggatgcctcccgccgttcccagcagacgtcttcatggtgccacagtatggatacctcaccctgaacaacgggagtcaggcagtaggacgctcttcattttactgcctagagtactttccttctcagatgctgcgtaccggaaacaactttaccttcagctacacctttgaggacgttcctttccacagcagctacgctcacagccagagtttggaccgtctcatgaatcctctcatcgaccagtacctgtattacttgagcagaacaaacactccaagcggaaccaccacgcagtccaggcttcagttttctcaggccggagcgagtgacattcaggaccagtctaggaactggcttcctggaccctgttaccgtcagcagcgagtatcaaagacatctgcggataacaacaacagtgaatactcgtggactggagctaccaagtaccacctcaatggcagagactctctggtgaatccgggcccggccatggccagccacaaagacgatgaagaaaagttttttcctcagagcggggttcttatctttgggaagcaaggctcagagaaaacaaatgtggatattgaaaaggtcatgattacagacgaagaggaaatcaggaccaccaatcccgtggctacggagcagtatggttctgtatctaccaacctccagagcggcaacacacaagcagctaccgcagatgtcaacacacaaggcgttcttccaggcatggtcgggcaagacagagacgtgtacctgcaggggcctacttgggcaaagattccacacacggacggacattttcacccctctcccctcatgggcggatttggacttaaacaccctcctccacagattctcatcaagaacaccccggtacctgcgaatccttcgaccaccttcagtgcggcaaagtttgcttccttcattacacagtactccacggggcaggtcagcgtggagatcgagtgggagctgcagaaggagaacagcaaacgctggaatcccgagatccagtacacttccaactacaacaagtctgttaatgtggactttactgtggacactaatggcgtgtattcagagcctcgccccattggcaccagatacctgactcgtaatctgtaa

SEQ ID NO: 238 - protein, 735 aa, Artificial Sequence
  source: /note="Description of Artificial Sequence: Synthetic polypeptide"
MAADGYLPDWLEDTLSEGIRQWWKLKPGPPPPKPAERHKDDSRGLVLPGYKYLGPFNGLDKGEPVNEADAAALEHDKAYDRQLDSGDNPYLKYNHADAEFQERLKEDTSFGGNLGRAVFQAKKRVLEPLSLVEEPVKTAPGKKRPVEHSPAEPDSSSGTGKSGNQPARKRLNFGQTGDSDSVPDPQPLGQPPAAPSGLGTNTMATGSGAPMADNNEGADGVGNSSGNWHCDSTWMGDRVITTSTRTWALPTYNNHLYKQISSQSGASNDNHYFGYSTPWGYFDFNRFHCHFSPRDWQRLINNNWGFRPKRLNFKLFNIQVKEVTQNDGTTTIANNLTSTVQVFTDSEYQLPYVLGSAHQGCLPPFPADVFMVPQYGYLTLNNGSQAVGRSSFYCLEYFPSQMLRTGNNFTFSYTFEDVPFHSSYAHSQSLDRLMNPLIDQYLYYLSRTNTPSGTTTQSRLQFSQAGASDIQDQSRNWLPGPCYRQQRVSKTSADNNNSEYSWTGATKYHLNGRDSLVNPGPAMASHKDDEEKFFPQSGVLIFGKQGSEKTNVDIEKVMITDEEEIRTTNPVATEQYGSVSTNLQSGNTQAATADVNTQGVLPGMVGQDRDVYLQGPTWAKIPHTDGHFHPSPLMGGFGLKHPPPQILIKNTPVPANPSTTFSAAKFASFITQYSTGQVSVEIEWELQKENSKRWNPEIQYTSNYNKSVNVDFTVDTNGVYSEPRPIGTRYLTRNL

SEQ ID NO: 239 - DNA, 2208 bp, Artificial Sequence
  source: /note="Description of Artificial Sequence: Synthetic polynucleotide"
atggctgccgatggttatcttccagattggctcgaggacactctctctgaaggaataagacagtggtggaagctcaaacctggcccaccaccaccaaagcccgcagagcggcataaggacgacagcaggggtcttgtgcttcctgggtacaagtacctcggacccttcaacggactcgacaagggagagccggtcaacgaggcagacgccgcggccctcgagcacgacaaggcctacgaccggcagctcgacagcggagacaacccgtacctcaagtacaaccacgccgacgcagagtttcaggagcgccttaaagaagatacgtcttttgggggcaacctcggacgagcagtcttccaggcaaaaaagagggttctggaacctctgggcctggttgaggagcctgttaagacggctccgggaaaaaagaggccggtagagcactctcctgcagagccagattcctcctccggaactggaaagtcgggcaaccagcctgcaagaaagagattgaatttcggtcagactggagactcagactccgtacctgacccccagcctctcggacagccaccagcagccccctctggtctgggaactaatacgatggctacaggcagtggcgcaccaatggcagacaataacgagggcgccgacggagtgggtaattcctcgggaaattggcattgcgattccacatggatgggcgacagagtcatcaccaccagcacccgaacctgggccctgcccacctacaacaaccatctgtacaagcaaatatccagccagtctggagccagcaacgacaatcactactttggctacagcaccccctgggggtattttgacttcaacagattccactgccacttttcaccacgtgactggcaaagactcatcaacaacaactggggattccgacccaagagactcaacttcaagctctttaacattcaagtcaaagaggtcacgcagaatgacggtacgacgacgattgccaataaccttaccagcacggttcaggtgtttactgactcggagtaccagctcccgtacgtcctcggctcggcgcatcaaggatgcctcccgccgttcccagcagacgtcttcatggtgccacagtatggatacctcaccctgaacaacgggagtcaggcagtaggacgctcttcattttactgcctagggtactttccttctcagatgctgcgtaccggaaacaactttaccttcagctacacctttgaggacgttcctttccacagcagctacgctcacagccagagtttggaccgtctcatgaatcctctcatcgaccagtacctgtattacttgagcagaacaaacactccaagcggaaccaccacgcagtccaggcttcagttttctcaggccggagcgagtgacattcgggaccagtctaggaactggcttcctggaccctgttaccgtcagcagcgagtatcaaagacatctgcggataacaacaacagtgaatactcgtggactggagctaccaagtaccacctcaatggcagagactctctggtgaatccgggcccggccatggccagccacaaagacgatgaagaaaagttttttcctcagagcggggttcttatctttgggaagcaaggcccagagaaaacaaatgtggatattgaaaaggtcatgattacagacgaagaggaaatcaggaccaccaatcccgtggctacggagcagtatggttctgtatctaccaacctccagagcggcaacacacaagcagctaccgcagatgtcaacacacaaggcgttcttccaggcatggtctggcaagacagagacgtgtacctgcaggggcctatttgggcaaagattccacacacggacggacattttcacccctctcccctcatgggcggatttggacttaaacaccctcctccacagattctcatcaagaacaccccggtacctgcgaatccttcgaccaccttcagtgcggcaaagtttgcttccttcattacacagtactccacggggcaggtcagcgtggagatcgagtgggagctgcagaaggagaacagcaaacgctggaatcccgagatccagtacacttccaactacaacaagtctgttaatgtggactttactgtggacactaatggcgtgtattcagagcctcgccccattggcaccagatacctgactcgtaatctgtaa

SEQ ID NO: 240 - protein, 735 aa, Artificial Sequence
  source: /note="Description of Artificial Sequence: Synthetic polypeptide"
MAADGYLPDWLEDTLSEGIRQWWKLKPGPPPPKPAERHKDDSRGLVLPGYKYLGPFNGLDKGEPVNEADAAALEHDKAYDRQLDSGDNPYLKYNHADAEFQERLKEDTSFGGNLGRAVFQAKKRVLEPLGLVEEPVKTAPGKKRPVEHSPAEPDSSSGTGKSGNQPARKRLNFGQTGDSDSVPDPQPLGQPPAAPSGLGTNTMATGSGAPMADNNEGADGVGNSSGNWHCDSTWMGDRVITTSTRTWALPTYNNHLYKQISSQSGASNDNHYFGYSTPWGYFDFNRFHCHFSPRDWQRLINNNWGFRPKRLNFKLFNIQVKEVTQNDGTTTIANNLTSTVQVFTDSEYQLPYVLGSAHQGCLPPFPADVFMVPQYGYLTLNNGSQAVGRSSFYCLGYFPSQMLRTGNNFTFSYTFEDVPFHSSYAHSQSLDRLMNPLIDQYLYYLSRTNTPSGTTTQSRLQFSQAGASDIRDQSRNWLPGPCYRQQRVSKTSADNNNSEYSWTGATKYHLNGRDSLVNPGPAMASHKDDEEKFFPQSGVLIFGKQGPEKTNVDIEKVMITDEEEIRTTNPVATEQYGSVSTNLQSGNTQAATADVNTQGVLPGMVWQDRDVYLQGPIWAKIPHTDGHFHPSPLMGGFGLKHPPPQILIKNTPVPANPSTTFSAAKFASFITQYSTGQVSVEIEWELQKENSKRWNPEIQYTSNYNKSVNVDFTVDTNGVYSEPRPIGTRYLTRNL

SEQ ID NO: 241 - protein, 735 aa, Artificial Sequence
  source: /note="Description of Artificial Sequence: Synthetic polypeptide"
MAADGYLPDWLEDTLSEGIRQWWKLKPGPPPPKPAERHKDDSRGLVLPGYKYLGPFNGLDKGEPVNEADAAALEHDKAYDRQLDSGDNPYLKYNHADAEFQERLKEDTSFGGNLGRAVFQAKKRVLEPLGLVEEPVKTAPGKKRPVEHSPAEPDSSSGTGKSGNQPARKRLNFGQTGDSDSVPDPQPLGQPPAAPSGLGTNTMATGSGAPMADNNEGADGVGNSSGNWHCDSTWMGDRVITTSTRTWALPTYNNHLYKQISSQSGASNDNHYFGYSTPWGYFDFNRFHCHFSPRDWQRLINNNWGFRPKRLNFKLFNIQVKEVTQNDGTTTIANNLTSTVQVFTDSEYQLPYVLGSAHQGCLPPFPADVFMVPQYGYLTLNNGSQAVGRSSFYCLEYFPSQMLRTGNNFTFSYTFEDVPFHSSYAHSQSLDRLMNPLIDQYLYYLSRTNTPSGTTTQSRLQFSQAGASDIRDQSRNWLPGPCYRQQRVSKTSADNNNSEYSWTGATKYHLNGRDSLVNPGPAMASHKDDEEKFFPQSGVLIFGKQGPEKTNVDIEKVMITDEEEIRTTNPVATEQYGSVSTNLQSGNTQAATADVNTQGVLPGMVWQDRDVYLQGPIWAKIPHTDGHFHPSPLMGGFGLKHPPPQILIKNTPVPANPSTTFSAAKFASFITQYSTGQVSVEIEWELQKENSKRWNPEIQYTSNYNKSVNVDFTVDTNGVYSEPRPIGTRYLTRNL

SEQ ID NO: 242 - protein, 735 aa, Artificial Sequence; identical to SEQ ID NO: 241
  source: /note="Description of Artificial Sequence: Synthetic polypeptide"

SEQ ID NO: 243 - DNA, 2211 bp, Artificial Sequence
  source: /note="Description of Artificial Sequence: Synthetic polynucleotide"
atggctgccgatggttatcttccagattggctcgaggacactctctctgaaggaataagacagtggtggaagctcaaacctggcccaccaccaccaaagcccgcagagcggcataaggacgacagcaggggtcttgtgcttcctgggtacaagtacctcggacccttcaacggactcgacaagggggagccggtcaacgaggcagacgccgcggccctcgagcacgacaaggcctacgaccggcagctcgacagcggagacaacccgtacctcaagtacaaccacgccgacgcagagtttcaggagcgccttaaagaagatacgtcttttgggggcaacctcggacgagcagtcttccaggcgaaaaagagggttcttgaacctctgcggcctggtttgaggaaacctgttaagacggctccgggaaaaaagaggccggtagagcactctcctgtggagccagactcctcctcgggaaccggaaaagcgggccagcagcctgcaagaaaaagattaaattttggtcagactggagacgcagactccgtacctgacccccagcctctcggacagccaccagcagccccctctggtctgggatctactacaatggctacaggcagtggcgcaccaatggcagacaataacgagggtgccgatggagtgggtaattcctcaggaaattggcattgcgattcccaatggctggacgacagagtcatcgccaccagcacccgaacctgggccctgcccacatacaacaaccacctctacaagcaaatctccagccaatcaggagcctgcaacgacaaccactactttggctacagcaccccctgggggtattttgacttcaacagattccactgccacttttcaccacgtgactggcaaagactcatcaacagcaactggggattccggcccaaaagactcaacttcaagctctttaatattcaagtcaaagaggtcacgcagaatgacggtacgacgacgattgccaataaccttaccagcacggttcaggtgtttactgactcggagtaccagctcccgtacgtcccgggctcggcgcatcaaggatgcctcccgccgtttccagcggacgtcttcatggtcccacagtatggatacctcaccctgaacaacgggagtcaggcggtaggacgctcttccttttactgcctggagtactttccttctcagatgctgcgtactggaaacaactttcagttcagctacacttttgaagacgtgcctttccacagcagctacgctcactgccagagtctggatcggctgatgaatcctctgatcgaccagtacctgtattatctgaacaagacacaaacaaatagtggaactcttcagcagtctcggctactgtttagccaagctggaccaaccaacatgtctcttcaagctaaaaactggctgcctggaccttgctacagacagcagcgtctgtcaaaacaggcaaacgacaataacaactgcaactttccctggactgcagctacaaagtatcatctaaatggccgggactcgttggttaatccaggaccagctatggccagtcacaaggatgacgaagaaaagtttttccccatgcatggaaccctgatatttggtaaacaaggaacaaatgccaacgacgcggatttggaaaatgtcatgattacagatgaagaagaaatcaggcccaccaatcccgtggctacggagcagtacgggactgtgtcaaataatttgcaaaactcaaacactggtccaactacaggaactgtcaatcaccaaggagcgttacctggtatggtgtggcaggatcgagacgtgtacctgcagggacccatttgggccaagattcctcacaccgatggacactttcatccttctccactgatgggaggttttggactcaaacacccgcctcctcagatcatgatcaaaagcactcccgttccagccaatcctcccacaaacttcagttctgccaagtttgcttcttccatcacacagtattccacgggacaggtcagcgtggagatcgagtgggagctgcagaaggagaacagcaaacgctggaatcccgaaattcagtacacttccaactacaacaagtctgttaatgtggactttactgtggacactaatggtgtgtattcagagcctcgccccattggcaccagatacctgactcgtaatctgtaa

SEQ ID NO: 244 - protein, 736 aa, Artificial Sequence
  source: /note="Description of Artificial Sequence: Synthetic polypeptide"
MAADGYLPDWLEDTLSEGIRQWWKLKPGPPPPKPAERHKDDSRGLVLPGYKYLGPFNGLDKGEPVNEADAAALEHDKAYDRQLDSGDNPYLKYNHADAEFQERLKEDTSFGGNLGRAVFQAKKRVLEPLRPGLRKPVKTAPGKKRPVEHSPVEPDSSSGTGKAGQQPARKRLNFGQTGDADSVPDPQPLGQPPAAPSGLGSTTMATGSGAPMADNNEGADGVGNSSGNWHCDSQWLDDRVIATSTRTWALPTYNNHLYKQISSQSGACNDNHYFGYSTPWGYFDFNRFHCHFSPRDWQRLINSNWGFRPKRLNFKLFNIQVKEVTQNDGTTTIANNLTSTVQVFTDSEYQLPYVPGSAHQGCLPPFPADVFMVPQYGYLTLNNGSQAVGRSSFYCLEYFPSQMLRTGNNFQFSYTFEDVPFHSSYAHCQSLDRLMNPLIDQYLYYLNKTQTNSGTLQQSRLLFSQAGPTNMSLQAKNWLPGPCYRQQRLSKQANDNNNCNFPWTAATKYHLNGRDSLVNPGPAMASHKDDEEKFFPMHGTLIFGKQGTNANDADLENVMITDEEEIRPTNPVATEQYGTVSNNLQNSNTGPTTGTVNHQGALPGMVWQDRDVYLQGPIWAKIPHTDGHFHPSPLMGGFGLKHPPPQIMIKSTPVPANPPTNFSSAKFASSITQYSTGQVSVEIEWELQKENSKRWNPEIQYTSNYNKSVNVDFTVDTNGVYSEPRPIGTRYLTRNL

SEQ ID NO: 245 - DNA, 2208 bp, Artificial Sequence
  source: /note="Description of Artificial Sequence: Synthetic polynucleotide"
atggctgccgatggttatcttccagattggctcgaggacactctctctgaaggaataagacagtggtggaagctcaaacctggcccaccaccaccaaagcccgcagagcggcataaggacgacagcaggggtcttgtgcttcctgggtacaagtacctcggacccttcaacggactcgacaagggagagccggtcaacgaggcagacgccgcggccctcgagcacgacaaggcctacgaccggcagctcgacagcggagacaacccgtacctcaagtacaaccacgccgacgcggagtttcaggagcgccttaaagaggatacgtcttttgggggcaacctcggacgagcagtcttccaggcaaaaaagagggttctggaacctctgggcctggttgaggagcctgttaagacggctccgggaaaaaagaggccggtagagcactctcctgcagagccagattcctcctccggaactggaaagtcgggcaaccagcctgcaagaaagagattgaatttcggtcagactggagactcagactccgtacctgacccccagcctctcggacagccaccagcagccccctctggtctgggaactaatacgatggctacaggcagtggcgcaccaatggcagacaataacgagggcgccgacggagtgggtaattcctcgggaaattggcattgcgattccacatggatgggcgacagagtcatcaccaccagcacccgaacctgggccctgcccacctacaacaaccatctgtacaagcaaatatccagccagtctggagccagcaacgacaatcactactttggctacagcaccccctgggggtattttgacttcaacagattccactgccacttttcaccacgtgactggcaaagactcatcaacaacaactggggattccgacccaagagactcaacttcaagctctttaacattcaagtcaaagaggtcacgcagaatgacggtacgacgacgattgccaataaccttaccagcacggttcaggtgtttactgactcggagtaccagctcccgtacgtcctcggctcggcgcatcaaggatgcctcccgccgttcccagcagacgtcttcatggtgccacagtatggatacctcaccctgaacaacgggagtcaggcagtaggacgctcttcattttactgcctagagtactttccttctcagatgctgcgtaccggaaacagctttaccttcagctacacctttgaggacgttcctttccacagcagctacgctcacagccagagtttggaccgtctcatgaatcctctcatcgaccagtacctgtattacttgagcagaacaaacactccaagcggaaccaccacgcagtccaggcttcagttttctcaggccggagcgagtgacattcgggaccagtctaggaactggcttcctggaccctgttaccgtcagcagcgagtatcaaagacatctgcggataacaacaacagtgaatactcgtggactggagctaccaagtaccacctcaatggcagagactctctggtgaatccgggcccggccatggccagccacaaagacgatgaagaaaagttctttcctcagagcggggttcttatctttgggaagcaaggctcagagaaaacaaatgtggatattgaaaaggtcatgattacagacgaagaggaaatcaggaccaccaatcccgtggctacggagcagtatggttctgtatctaccaacctccagagcggcaacacacaagcagctaccgcagatgtcaacacacaaggcgttcttccaggcatggtctggcaagacagagacgtgtacctgcaggggcctatttgggcaaagattccacacacggacggacattttcacccctctcccctcatgggcggatttggacttaaacaccctcctccacagattctcatcaagaacaccccggtacctgcgaatccttcgaccaccttcagtgcggcaaagtttgcttccttcattacacagtactccacggggcaggtcagcgtggagatcgagtgggagctgcagaaggagaacagcaaacgctggaatcccgagatccagtacacttccaactacaacaagtctgttaatgtggactttactgtggacactaatggcgtgtattcagagcctcgccccattggcaccagatacctgactcgtaatctgtaa

SEQ ID NO: 246 - protein, 735 aa, Artificial Sequence
  source: /note="Description of Artificial Sequence: Synthetic polypeptide"
MAADGYLPDWLEDTLSEGIRQWWKLKPGPPPPKPAERHKDDSRGLVLPGYKYLGPFNGLDKGEPVNEADAAALEHDKAYDRQLDSGDNPYLKYNHADAEFQERLKEDTSFGGNLGRAVFQAKKRVLEPLGLVEEPVKTAPGKKRPVEHSPAEPDSSSGTGKSGNQPARKRLNFGQTGDSDSVPDPQPLGQPPAAPSGLGTNTMATGSGAPMADNNEGADGVGNSSGNWHCDSTWMGDRVITTSTRTWALPTYNNHLYKQISSQSGASNDNHYFGYSTPWGYFDFNRFHCHFSPRDWQRLINNNWGFRPKRLNFKLFNIQVKEVTQNDGTTTIANNLTSTVQVFTDSEYQLPYVLGSAHQGCLPPFPADVFMVPQYGYLTLNNGSQAVGRSSFYCLEYFPSQMLRTGNSFTFSYTFEDVPFHSSYAHSQSLDRLMNPLIDQYLYYLSRTNTPSGTTTQSRLQFSQAGASDIRDQSRNWLPGPCYRQQRVSKTSADNNNSEYSWTGATKYHLNGRDSLVNPGPAMASHKDDEEKFFPQSGVLIFGKQGSEKTNVDIEKVMITDEEEIRTTNPVATEQYGSVSTNLQSGNTQAATADVNTQGVLPGMVWQDRDVYLQGPIWAKIPHTDGHFHPSPLMGGFGLKHPPPQILIKNTPVPANPSTTFSAAKFASFITQYSTGQVSVEIEWELQKENSKRWNPEIQYTSNYNKSVNVDFTVDTNGVYSEPRPIGTRYLTRNL

SEQ ID NO: 247 - DNA, 2211 bp, Artificial Sequence; identical to SEQ ID NO: 137
  source: /note="Description of Artificial Sequence: Synthetic polynucleotide"

SEQ ID NO: 248 - protein, 736 aa, Artificial Sequence
  source: /note="Description of Artificial Sequence: Synthetic polypeptide"
MAADGYLPDWLEDTLSEGIRQWWKLKPGPPPPKPAERHKDDSRGLVLPGYKYLGPGNGLDKGEPVNAADAAALEHDKAYDQQLKAGDNPYLKYNHADAEFQERLKEDTSFGGNLGRAVFQAKKRLLEPLGLVEEAAKTAPGKKRPVEQSPQEPDSSAGIGKSGSQPAKKKLNFGQTGDTESVPDPQPIGEPPAAPSGVGSLTMASGGGAPVADNNEGADGVGSSSGNWHCDSQWLGDRVITTSTRTWALPTYNNHLYKQISNSTSGGSSNDNAYFGYSTPWGYFDFNRFHCHFSPRDWQRLINNNWGFRPKRLNFKLFNIQVKEVTDNNGVKTIANNLTSTVQVFTDSDYQLPYVLGSAHEGCLPPFPADVFMIPQYGYLTLNDGGQAVGRSSFYCLEYFPSQMLRTGNNFQFSYEFENVPFHSSYAHSQSLDRLMNPLIDQYLYYLSKTINGSGQNQQTLKFSVAGPSNMAVQGRNYIPGPSYRQQRVSTTVTQNNNSEFAWPGASSWALNGRNSLMNPGPAMASHKEGEDRFFPLSGSLIFGKQGTGRDNVDADKVMITNEEEIKTTNPVATESYGQVATNHQSAQAQAQTGWVQNQGILPGMVWQDRDVYLQGPIWAKIPHTDGNFHPSPLMGGFGMKHPPPQILIKNTPVPADPPTAFNKDKLNSFITQYSTGQVSVEIEWELQKENSKRWNPEIQYTSNYYKSNNVEFAVSTEGVYSEPRPIGTRYLTRNL

SEQ ID NO: 249 - DNA, 2211 bp, Artificial Sequence
  source: /note="Description of Artificial Sequence: Synthetic polynucleotide"
atggctgccgatggttatcttccagattggctcgaggacactctctctgaaggaataagacagtggtggaagctcaaacctggcccaccaccaccaaagcccgcagagcggcataaggacgacagcaggggtcttgtgcttcctgggtacaagtacctcggacccggcaacggactcgacaagggggagccggtcaacgcagcagacgcggcggccctcgagcacgacaaggcctacgaccagcagctcaaggccggagacaacccgtacctcaagtacaaccacgccgacgccgagttccaggagcggctcaaagaagatacgtcttttgggggcaacctcgggcgagcagtcttccaggccaaaaagaggcttcttgaacctcttggtctggttgaggaagcggctaagacggctcctggaaagaagaggcctgtagagcagtctcctcaggaaccggactcctccgcgggtattggcaaatcgggttcacagcccgctaaaaagaaactcaatttcggtcagactggcgacacagagtcagtccccgaccctcaaccaatcggagaacctcccgcagccccctcaggtgtgggatctcttacaatggcttcaggtggtggcgcaccagtggcagacaataacgaaggtgccgatggagtgggtagttcctcgggaaattggcattgcgattcccaatggctgggggacagagtcatcaccaccagcacccgaacctgggccctgcccacctacaacaatcacctctacaagcaaatctccaacagcacatctggaggatcttcaaatgacaacgcctacttcggctacagcaccccctgggggtattttgacttcaacagattccactgccacttctcaccacgtgactggcagcgactcatcaacaacaactggggattccggcctaagcgactcaacttcaagctcttcaacattcaggtcaaagaggttacggacaacaatggagtcaagaccatcgccaataaccttaccagcacggtccaggtcttcacggactcagactatcagctcccgtacgtgctcgggtcggctcacgagggctgcctcccgccgttcccagcggacgttttcatgattcctcagtacgggtatctgacgcttaatgatgggagccaggccgtgggtcgttcgtccttttactgcctggaatatttcccgtcgcaaatgctaagaacgggtaacaacttccagttcagctacgagtttgagaacgtacctttccatagcagctacgctcacagccaaagcctggaccgactaatgaatccactcatcgaccaatacttgtactatctctcaaagactattaacggttctggacagaatcaacaaacgctaaaattcagcgtggccggacccagcaacatggctgtccagggaagaaactacatacctggacccagctaccgacaacaacgtgtctcaaccactgtgactcaaaacaacaacagcgaatttgcttggcctggagcttcttcttgggctctcaatggacgtaatagcttgatgaatcctggacctgctatggccagccacaaagaaggagaggaccgtttctttcctttgtctggatctttaatttttggcaaacaaggaactggaagagacaacgtggatgcggacaaagtcatgataaccaacgaagaagaaattaaaactactaacccggtagcaacggagtcctatggacaagtggccacaaaccaccagagtgcccaagcacaggcgcagaccggctgggttcaaaaccaaggaatacttccgggtatggtttggcaggacagagatgtgtacctgcaaggacccatttgggccaaaattcctcacacggacggcaactttcacccttctccgctaatgggagggtttggaatgaagcacccgcctcctcagatcctcatcaaaaacacacctgtacctgcggatcctccaacggctttcaataaggacaagctgaactctttcatcacccagtattctactggccaagtcagcgtggagattgagtgggagctgcagaaggaaaacagcaagcgctggaacccggagatccagtacacttccaactattacaagtctaataatgttgaatttgctgttaatactgaaggtgtatatagtgaaccccgccccattggcaccagatacctgactcgtaatctgtaa

SEQ ID NO: 250 - protein, 736 aa, Artificial Sequence
  source: /note="Description of Artificial Sequence: Synthetic polypeptide"
MAADGYLPDWLEDTLSEGIRQWWKLKPGPPPPKPAERHKDDSRGLVLPGYKYLGPGNGLDKGEPVNAADAAALEHDKAYDQQLKAGDNPYLKYNHADAEFQERLKEDTSFGGNLGRAVFQAKKRLLEPLGLVEEAAKTAPGKKRPVEQSPQEPDSSAGIGKSGSQPAKKKLNFGQTGDTESVPDPQPIGEPPAAPSGVGSLTMASGGGAPVADNNEGADGVGSSSGNWHCDSQWLGDRVITTSTRTWALPTYNNHLYKQISNSTSGGSSNDNAYFGYSTPWGYFDFNRFHCHFSPRDWQRLINNNWGFRPKRLNFKLFNIQVKEVTDNNGVKTIANNLTSTVQVFTDSDYQLPYVLGSAHEGCLPPFPADVFMIPQYGYLTLNDGSQAVGRSSFYCLEYFPSQMLRTGNNFQFSYEFENVPFHSSYAHSQSLDRLMNPLIDQYLYYLSKTINGSGQNQQTLKFSVAGPSNMAVQGRNYIPGPSYRQQRVSTTVTQNNNSEFAWPGASSWALNGRNSLMNPGPAMASHKEGEDRFFPLSGSLIFGKQGTGRDNVDADKVMITNEEEIKTTNPVATESYGQVATNHQSAQAQAQTGWVQNQGILPGMVWQDRDVYLQGPIWAKIPHTDGNFHPSPLMGGFGMKHPPPQILIKNTPVPADPPTAFNKDKLNSFITQYSTGQVSVEIEWELQKENSKRWNPEIQYTSNYYKSNNVEFAVNTEGVYSEPRPIGTRYLTRNL

SEQ ID NO: 251 - DNA, 2208 bp, Artificial Sequence
  source: /note="Description of Artificial Sequence: Synthetic polynucleotide"
atggctgccgatggttatcttccagattggctcgaggacactctctctgaaggaataagacagcggtggaagctcaaacctggcccaccaccaccagagcccgcagagcggcataaggacgacagcaggggtcttgtgcttcctgggtacaagtacctcggacccttcaacggactcgacaagggagagccggtcaacgaggcagacgccgcggccctcgagcacgacaaagcctacgaccggcagctcgacagcggagacaacccgtacctcaagtacaaccacgccgacgcggagtttcaggagcgccttaaagaagatacgtcttttgggggcaacctcggacgagcagtcttccaggcgaaaaagagggtacttgaacctctgggcctggttgaggaacctgttaagacggctccgggaaaaaagaggccggtagagcactctcctgtggagccagactcctcctcgggaaccggaaaggcgggccagcagcctgcaagaaaaagattgaattttggtcagactggagacgcagactcagtacctgacccccagcctctcggacagccaccagcagccccctctggtctgggaactaatacgatggctacaggcagtggcgcaccaatggcagacaataacgagggcgccgacggagtgggtaattcctcgggaaattggcattgcgattccacatggatgggcgacagagtcatcaccaccagcacccgaacctgggccctgcccacctacaacaaccacctctacaaacaaatttccagccaatcaggagcctcgaacgacaatcactactttggctacagcaccccttgggggtattttgacttcaacagattccactgccacttttcaccacgtgactggcaaagactcatcaacaacaactggggattccgacccaagagactcaacttcaagctctttaacattcaagtcaaagaggtcacgcagaatgacggtacgacgacgattgccaataaccttaccggcacggttcaggtgtttactgactcggagtaccagctcccgtacgtcctcggctcggcgcatcaaggatgcctcccgccgttcccagcagacgtcttcatggtgccacagtatggatacctcaccctgaacaacgggagtcaggcagtaggacgctcttcattttactgcctggagtactttccttctcagatgctgcgtaccggaaacaactttaccttcagctacacttttgaggacgttcctttccacagcagctacgctcacagccagagtctgggccgtctcatgaatcctctcatcgaccagtacctgtattacttgagcagaacaaacactccaagtggaaccaccacgcagtcaaggcttcagttttctcaggccggagcgagtgacattcgggaccagtctaggaactggcttcctggaccctgttaccgccagcagcgagtatcaaagacatctgcggataacaacaacagtgaatactcgtggactggagctaccaagtaccacctcaatggcagagactctctggtgaatccgggcccggccatggcaagccacaaggacgatgaagaaaagttttttcctcagagcggggttctcatctttgggaagcaaggctcagagaaaacaaatgtggacattgaaaaggtcatgattacagacgaagaggaaatcaggacaaccaatcccgtggctacggagcagtatggttctgtatctaccaacctccagagaggcaacagacaagcagctaccgcagatgtcaacacacaaggcgttcttccaggcatggtctggcaggacagagatgtgtaccttcaggggcccatctgggcaaagattccacacacggacggacattttcacccctctcccctcatgggtggattcggacttaaacaccctcctccacagattctcatcaagaacaccccggtacctgcgaatccttcgaccaccttcagtgcggcaaagtttgcttccttcatcacacagtactccacgggacaggtcagcgtggagatcgagtgggagctgcagaaggaaaacagcaaacgctggaatcccgaaattcagtacacttccaactacaacaagtctgttaatgtggactttactgtggacactaatggcgtgtattcagagcctcgccccattggcaccagatacctgactcgtaatctgtaa

SEQ ID NO: 252 - protein, 735 aa, Artificial Sequence
  source: /note="Description of Artificial Sequence: Synthetic polypeptide"
MAADGYLPDWLEDTLSEGIRQRWKLKPGPPPPEPAERHKDDSRGLVLPGYKYLGPFNGLDKGEPVNEADAAALEHDKAYDRQLDSGDNPYLKYNHADAEFQERLKEDTSFGGNLGRAVFQAKKRVLEPLGLVEEPVKTAPGKKRPVEHSPVEPDSSSGTGKAGQQPARKRLNFGQTGDADSVPDPQPLGQPPAAPSGLGTNTMATGSGAPMADNNEGADGVGNSSGNWHCDSTWMGDRVITTSTRTWALPTYNNHLYKQISSQSGASNDNHYFGYSTPWGYFDFNRFHCHFSPRDWQRLINNNWGFRPKRLNFKLFNIQVKEVTQNDGTTTIANNLTGTVQVFTDSEYQLPYVLGSAHQGCLPPFPADVFMVPQYGYLTLNNGSQAVGRSSFYCLEYFPSQMLRTGNNFTFSYTFEDVPFHSSYAHSQSLGRLMNPLIDQYLYYLSRTNTPSGTTTQSRLQFSQAGASDIRDQSRNWLPGPCYRQQRVSKTSADNNNSEYSWTGATKYHLNGRDSLVNPGPAMASHKDDEEKFFPQSGVLIFGKQGSEKTNVDIEKVMITDEEEIRTTNPVATEQYGSVSTNLQRGNRQAATADVNTQGVLPGMVWQDRDVYLQGPIWAKIPHTDGHFHPSPLMGGFGLKHPPPQILIKNTPVPANPSTTFSAAKFASFITQYSTGQVSVEIEWELQKENSKRWNPEIQYTSNYNKSVNVDFTVDTNGVYSEPRPIGTRYLTRNL

SEQ ID NO: 253 - DNA, 2208 bp, Artificial Sequence
  source: /note="Description of Artificial Sequence: Synthetic polynucleotide"
atggctgccgatggttatcttccagattggctcgaggacactctctctgaaggaataagacagcggtggaagctcaaacctggcccaccaccaccagagcccgcagagcggcataaggacgacagcaggggtcttgtgcttcctgggtacaagtacctcggacccttcaacggactcgacaagggagagccggtcaacgaggcagacgccgcggccctcgagcacgacaaagcctacgaccggcagctcgacagcggagacaacccgtacctcaagtacaaccacgccgacgcggagtttcaggagcgccttaaagaagatacgtcctttgggggcaacctcggacgagcagtcttccaggcgaaaaagagggtacttgaacctctgggcctggttgaggaacctgttaagacggctccgggaaaaaagaggccggtagagcactctcctgtggagccagactcctcctcgggaaccggaaaggcgggccagcagcctgcaagaaaaagattgaattttggtcagactggagacgcagactcagtacctgacccccagcctctcggacagccaccagcagccccctctggtctgggaactaatacgatggctacaggcagtggcgcaccaatggcagacaataacgagggcgccgacggagtgggtaattcctcgggaaattggcattgcgattccacatggatgggcgacagagtcatcaccaccagcacccgaacctgggccctgcccacctacaacaaccacctctacaaacaaatttccagccaatcaggagcctcgaacgacaatcactactttggctacagcaccccttgggggtattttgacttcaacagattccactgccacttttcaccacgtgactggcaaagactcatcaacaacaactggggattccgacccaagagactcaacttcaagctctttaacattcaagtcaaagaggtcacgcagaatgacggtacgacgacgattgccaataaccttaccagcacggttcaggtgtttactgactcggagtaccagctcccgtacgtcctcggctcggcgcatcaaggatgcctcccgccgttcccagcagacgtcttcatggtgccacagtatggatacctcaccctgaacaacgagagtcaggcagtaggacgctcttcattttactgcctggagtactttccttctcagatgctgcgtaccggaaacaactttaccttcagctacacttttgaggacgttcctttccacagcagctacgctcacagccagagtctgggccgtctcatgaatcctctcatcgaccagtacctgtattacttgagcagaacaaacactccaagtggaaccaccacgcagtcaaggcttcagttttctcaggccggagcgagtgacattcgggaccagtctaggaactggcttcctggaccctgttaccgccagcagcgagtatcaaagacatctgcggataacaacaacagtgaatactcgtggactggagctaccaagtaccacctcaatggcagagactctctggtgaatccgggcccggccatggcaagccacaaggacgatgaagaaaagttttttcctcagagcggggttctcatctttgggaagcaaggctcagagaaaacaaatgtggacattgaaaaggtcatgattacagacgaagaggaaatcaggacaaccaatcccgtggctacggagcagtatggttctgtatctaccaacctccagagaggcaacagacaagcagctaccgcagatgtcaacacacaaggcgttcttccaggcatggtctggcaggacagagatgtgtaccttcaggggcccatctgggcaaagattccacacacggacggacattttcacccctctcccctcatgggtggattcggacttaaacaccctcctccacagattctcatcaagaacaccccggtacctgcgaatccttcgaccaccttcagtgcggcaaagtttgcttccttcatcacacagtactccacgggacaggtcagcgtggagatcgagtgggagctgcagaaggaaaacagcaaacgctggaatcccgaaattcagtacacttccaactacaacaagtctgttaatgtggactttactgtggacactaatggcgtgtattcagagcctcgccccattggcaccagatacctgactcgtaatctgtaa

SEQ ID NO: 254 - protein, 735 aa, Artificial Sequence
  source: /note="Description of Artificial Sequence: Synthetic polypeptide"
MAADGYLPDWLEDTLSEGIRQRWKLKPGPPPPEPAERHKDDSRGLVLPGYKYLGPFNGLDKGEPVNEADAAALEHDKAYDRQLDSGDNPYLKYNHADAEFQERLKEDTSFGGNLGRAVFQAKKRVLEPLGLVEEPVKTAPGKKRPVEHSPVEPDSSSGTGKAGQQPARKRLNFGQTGDADSVPDPQPLGQPPAAPSGLGTNTMATGSGAPMADNNEGADGVGNSSGNWHCDSTWMGDRVITTSTRTWALPTYNNHLYKQISSQSGASNDNHYFGYSTPWGYFDFNRFHCHFSPRDWQRLINNNWGFRPKRLNFKLFNIQVKEVTQNDGTTTIANNLTSTVQVFTDSEYQLPYVLGSAHQGCLPPFPADVFMVPQYGYLTLNNESQAVGRSSFYCLEYFPSQMLRTGNNFTFSYTFEDVPFHSSYAHSQSLGRLMNPLIDQYLYYLSRTNTPSGTTTQSRLQFSQAGASDIRDQSRNWLPGPCYRQQRVSKTSADNNNSEYSWTGATKYHLNGRDSLVNPGPAMASHKDDEEKFFPQSGVLIFGKQGSEKTNVDIEKVMITDEEEIRTTNPVATEQYGSVSTNLQRGNRQAATADVNTQGVLPGMVWQDRDVYLQGPIWAKIPHTDGHFHPSPLMGGFGLKHPPPQILIKNTPVPANPSTTFSAAKFASFITQYSTGQVSVEIEWELQKENSKRWNPEIQYTSNYNKSVNVDFTVDTNGVYSEPRPIGTRYLTRNL

SEQ ID NO: 255 - DNA, 2208 bp, Artificial Sequence
  source: /note="Description of Artificial Sequence: Synthetic polynucleotide"
atggctgccgatggttatcttccagattggctcgaggacactctctctgaaggaataagacagcggtggaagctcaaacctggcccaccaccaccagagcccgcagagcggcataaggacgacagcaggggtcttgtgcttcctgggtacaagtacctcggacccttcaacggactcgacaagggagagccggtcaacgaggcagacgccgcggccctcgagcacgacaaagcctacgaccggcagctcgacagcggagacaacccgtacctcaagtacaaccacgccgacgcggagtttcaggagcgccttaaagaagatacgtcttttgggggcaacctcggacgagcagtcttccaggcgaaaaagagggtacttgaacctctgggcctggttgaggaacctgttaagacggctccgggaaaaaagaggccggtagagcactctcctgtggagccagactcctcctcgggaaccggaaaggcgggccagcagcctgcaagaaaaagattgaattttggtcagactggagacgcagactcagtacctgacccccagcctctcggacagccaccagcagccccctctggtctgggaactaatacgatggctacaggcagtggcgcaccaatggcagacaataacgagggcgccgacggagtgggtaattcctcgggaaattggcattgcgattccacatggatgggcgacagagtcatcaccaccagcacccgaacctgggccctgcccacctacaacaaccacctctacaaacaaatttccagccaatcaggagcctcgaacgacaatcactactttggctacagcaccccttgggggtattttgacttcaacagattccactgccacttttcaccacgtgactggcaaagactcatcaacaacaactggggattccgacccaagagactcaacttcaagctctttaacattcaagtcaaagaggtcacgcagaatgacggtacgacgacgattgccaataaccttaccagcacggttcaggtgtttactgactcggagtaccagctcccgtacgtcctcggctcggcgcatcaaggatgcctcccgccgttcccagcagacgtcttcatggtaccacagtatggatacctcaccctgaacaacgggagtcaggcagtaggacgctcttcattttactgcctggagtactttccttctcagatgctgcgtaccggaaacaactttaccttcagctacacttttgaggacgttcctttccacagcagctacgctcacagccagagtctgggccgtctcatgaatcctctcatcgaccagtacctgtattacttgagcagaacaaacactccaagtggaaccaccacgcagtcaaggcttcagttttctcaggccggagcgagtgacattcgggaccagtctaggaactggcttcctggaccctgttaccgccagcagcgagtatcaaagacatctgcggataacaacaacagtgaatactcgtggactggagctaccaagtaccacctcaatggcagagactctctggtgaatccgggcccggccatggcaagccacaaggacgatgaagaaaagttttttcctcagagcggggttctcatctttgggaagcaaggctcagagaaaacaaatgtggacattgaaaaggtcatgattacagacgaagaggaaatcaggacaaccaatcccgtggctacggagcagtatggttctgtatctaccaacctccagagaggcaacagacaagcagctaccgcagatgtcaacacacaaggcgttcttccaggcatggtctggcaggacagagatgtgtaccttcaggggcccatctgggcaaagattccacacacggacggacattttcacccctctcccctcatgggtggattcggacttaaacaccctcctccacagattctcatcaagaacaccccggtacctgcgaatccttcgaccaccttcagtgcggcaaagtttgcttccttcatcacacagtactccacgggacaggtcagcgtggagatcgagtgggagctgcagaaggaaaacagcaaacgctggaatcccgaaattcagtacacttccaactacaacaagtctgttaatgtggactttactgtggacactaatggcgtgtattcagagcctcgccccattggcaccagatacctgactcgtaatctgtaa

SEQ ID NO: 256 - protein, 735 aa, Artificial Sequence
  source: /note="Description of Artificial Sequence: Synthetic polypeptide"
MAADGYLPDWLEDTLSEGIRQRWKLKPGPPPPEPAERHKDDSRGLVLPGYKYLGPFNGLDKGEPVNEADAAALEHDKAYDRQLDSGDNPYLKYNHADAEFQERLKEDTSFGGNLGRAVFQAKKRVLEPLGLVEEPVKTAPGKKRPVEHSPVEPDSSSGTGKAGQQPARKRLNFGQTGDADSVPDPQPLGQPPAAPSGLGTNTMATGSGAPMADNNEGADGVGNSSGNWHCDSTWMGDRVITTSTRTWALPTYNNHLYKQISSQSGASNDNHYFGYSTPWGYFDFNRFHCHFSPRDWQRLINNNWGFRPKRLNFKLFNIQVKEVTQNDGTTTIANNLTSTVQVFTDSEYQLPYVLGSAHQGCLPPFPADVFMVPQYGYLTLNNGSQAVGRSSFYCLEYFPSQMLRTGNNFTFSYTFEDVPFHSSYAHSQSLGRLMNPLIDQYLYYLSRTNTPSGTTTQSRLQFSQAGASDIRDQSRNWLPGPCYRQQRVSKTSADNNNSEYSWTGATKYHLNGRDSLVNPGPAMASHKDDEEKFFPQSGVLIFGKQGSEKTNVDIEKVMITDEEEIRTTNPVATEQYGSVSTNLQRGNRQAATADVNTQGVLPGMVWQDRDVYLQGPIWAKIPHTDGHFHPSPLMGGFGLKHPPPQILIKNTPVPANPSTTFSAAKFASFITQYSTGQVSVEIEWELQKENSKRWNPEIQYTSNYNKSVNVDFTVDTNGVYSEPRPIGTRYLTRNL

SEQ ID NO: 257 - DNA, 2208 bp, Artificial Sequence
  source: /note="Description of Artificial Sequence: Synthetic polynucleotide"
atggctgccgatggttatcttccagattggctcgaggacactctctctgaaggaataagacagcggtggaagctcaaacctggcccaccaccaccagagcccgcagagcggcataaggacgacagcaggggtcttgtgcttcctgggtacaagtacctcggacccttcaacggactcgacaagggagagccggtcaacgaggcagacgccgcggccctcgagcacgacaaagcctacgaccggcagctcgacagcggagacaacccgtacctcaagtacaaccacgccgacgcggagtttcaggagcgccttaaagaagatacgtcttttgggggcaacctcggacgagcagtcttccaggcgaaaaagagggtactcgaacctctgggcctggttgaggaacctgttaagacggctccgggaaaaaagaggccggtagagcactctcctgtggagccagactcctcctcgggaaccggaaaggcgggccagcagcctgcaagaaaaagattgaattttggtcagactggagacgcagactcagtacctgacccccagcctctcggacagccaccagcagccccctctggtctgggaactaatacgatggctacaggcagtggcgcaccaatggcagacaataacgagggcgccgacggagtgggtaattcctcgggaaattggcattgcgattccacatggatgggcgacagagtcatcaccaccagcacccgaacctgggccctgcccacctacaacaaccacctctacaaacaaatttccagccaatcaggagcctcgaacgacaatcactactttggctacagcaccccttgggggtattttgacttcaacagattccactgccacttttcaccacgtgactggcaaagactcatcaacaacaactggggattccgacccaagagactcaacttcaagctctttaacattcaagtcaaagaggtcacgcagaatgacggtacgacgacgattgccaataaccttaccagcacggttcaggtgtttactgactcggagtaccagctcccgtacgtcctcggctcggcgcatcaaggatgcctcccgccgttcccagcagacgtcttcatggtgccacagtatggatacctcaccctgaacaacgggagtcaggcagcaggacgctcttcattttactgcctggagtactttccttctcagatgctgcgtaccggaaacaactttaccttcagctacacttttgaggacgttcctttccacagcagctacgctcacagccagagtctgggccgtctcatgaatcctctcatcgaccagtacctgtattacttgagcagaacaaacactccaagtggaaccaccacgcagtcaaggcttcagttttctcaggccggagcgagtgacattcgggaccagtctaggaactggcttcctggaccctgttaccgccagcagcgagtatcaaagacatctgcggataacaacaacagtgaatactcgtggactggagctaccaagtaccacctcaatggcagagactctctggtgaatccgggcccggccatggcaagccacaaggacgatgaagaaaagttttttcctcagagcggggttctcatctttgggaagcaaggctcagagaaaacaaatgtggacattgaaaaggtcatgattacagacgaagaggaaatcaggacaaccaatcccgtggctacggagcagtatggttctgtatctaccaacctccagagaggcaacagacaagcagctaccgcagatgtcaacacacaaggcgttcttccaggcatggtctggcaggacagagatgtgtaccttcaggggcccatctgggcaaagattccacacacggacggacattttcacccctctcccctcatgggtggattcggacttaaacaccctcctccacagattctcatcaagaacaccccggtacctgcgaatccttcgaccaccttcagtgcggcaaagtttgcttccttcatcacacagtactccacgggacaggtcagcgtggagatcgagtgggagctgcagaaggaaaacagcaaacgctggaatcccgaaattcagtacacttccaactacaacaagtccgttaatgtggactttactgtggacactaatggcgtgtattcagagcctcgccccattggcaccagatacctgactcgtaatctgtaa

SEQ ID NO: 258 - protein, 735 aa, Artificial Sequence
  source: /note="Description of Artificial Sequence: Synthetic polypeptide"
MAADGYLPDWLEDTLSEGIRQRWKLKPGPPPPEPAERHKDDSRGLVLPGYKYLGPFNGLDKGEPVNEADAAALEHDKAYDRQLDSGDNPYLKYNHADAEFQERLKEDTSFGGNLGRAVFQAKKRVLEPLGLVEEPVKTAPGKKRPVEHSPVEPDSSSGTGKAGQQPARKRLNFGQTGDADSVPDPQPLGQPPAAPSGLGTNTMATGSGAPMADNNEGADGVGNSSGNWHCDSTWMGDRVITTSTRTWALPTYNNHLYKQISSQSGASNDNHYFGYSTPWGYFDFNRFHCHFSPRDWQRLINNNWGFRPKRLNFKLFNIQVKEVTQNDGTTTIANNLTSTVQVFTDSEYQLPYVLGSAHQGCLPPFPADVFMVPQYGYLTLNNGSQAAGRSSFYCLEYFPSQMLRTGNNFTFSYTFEDVPFHSSYAHSQSLGRLMNPLIDQYLYYLSRTNTPSGTTTQSRLQFSQAGASDIRDQSRNWLPGPCYRQQRVSKTSADNNNSEYSWTGATKYHLNGRDSLVNPGPAMASHKDDEEKFFPQSGVLIFGKQGSEKTNVDIEKVMITDEEEIRTTNPVATEQYGSVSTNLQRGNRQAATADVNTQGVLPGMVWQDRDVYLQGPIWAKIPHTDGHFHPSPLMGGFGLKHPPPQILIKNTPVPANPSTTFSAAKFASFITQYSTGQVSVEIEWELQKENSKRWNPEIQYTSNYNKSVNVDFTVDTNGVYSEPRPIGTRYLTRNL

SEQ ID NO: 259 - protein, 738 aa, Artificial Sequence; identical to SEQ ID NO: 101
  source: /note="Description of Artificial Sequence: Synthetic polypeptide"

SEQ ID NO: 260 - DNA, 2217 bp, Artificial Sequence
  source: /note="Description of Artificial Sequence: Synthetic polynucleotide"
atggctgctgacggttatcttccagattggctcgaggacaacctctctgagggcattcgcgagtggtgggacctgaaacctggagcccccaagcccaaggccaaccagcagaagcaggacgacggccggggtctggtgcttcctggctacaagtacctcggacccttcaacggactcgacaagggggagcccgtcaacgcggcggacgcagcggccctcgagcacgacaaggcctacgaccagcagctcaaagcgggtgacaatccgtacctgcggtataaccacgccgacgccgagtttcaggagcgtctgcaagaagatacgtcttttgggggcaacctcgggcgagcagtcttccaggccaagaagcgggttctcgaacctctcggtctggttgaggaagctgctaagacggctcctggaaagaagagaccggtagaaccgtcacctcagcgttcccccgactcctccacgggcatcggcaagaaaggccagcagcccgctaaaaagagactgaactttggtcagactggcgactcagagtcagtccccgaccctcaaccaatcggagaaccaccagcaggcccctctggtctgggatctggtacaatggctgcaggcggtggcgctccaatggcagacaataacgaaggcgccgacggagtgggtagttcctcaggaaattggcattgcgattccacatggctgggcgacagagtcatcaccaccagcacccgaacctgggccctgcccacctacaacaaccacctctacaagcaaatatccaatgggacatcgggaggaagcaccaacgacaacacctacttcggctacagcaccccctgggggtattttgacttcaacagattccactgccacttctcaccacgtgactggcagcgactcatcaacaacaactggggattccggccaaaaagactcagcttcaagctcttcaacatccaggtcaaggaggtcacgcagaatgaaggcaccaagaccatcgccaataaccttaccagcacgattcaggtatttacggactcggaataccagctgccgtacgtcctcggctccgcgcaccagggctgcctgcctccgttcccggcggacgtcttcatgattccccagtacggctaccttacactgaacaatggaagtcaagccgtaggccgttcctccttctactgcctggaatattttccatctcaaatgctgcgaactggaaacaattttgaattcagctacaccttcgaggacgtgcctttccacagcagctacgcacacagccagagcttggaccgactgatgaatcctctcatcgaccagtacctgtactacttatccagaactcagtccacaggaggaactcaaggtacccagcaattgttattttctcaagctgggcctgcaaacatgtcggctcaggctaagaactggctacctggaccttgctaccggcagcagcgagtctctacgacactgtcgcaaaacaacaacagcaactttgcttggactggtgccaccaaatatcacctgaacggaagagactctttggtaaatcccggtgtcgccatggcaacccacaaggacgacgaggaacgcttcttcccgtcgagtggagtcctgatgttcggaaaacagggtgctggaagagacaatgtggactacagcagcgttatgctaaccagcgaagaagaaattaaaaccactaaccccgtagccacagaacaatacggtgtggtggctgacaacttgcagcaaaccaatacagggcctattgtgggaaatgtcaacagccaaggagccttacctggcatggtctggcagaaccgagacgtgtacctgcagggtcccatctgggccaagattcctcacacggacggcaacttccacccttcaccgctaatgggaggatttggactgaagcacccacctcctcagatcctgatcaagaacacgccggtacctgcggatcctccaacaacgttcagccaggcgaaattggcttccttcattacgcagtacagcaccggacaggtcagcgtggaaatcgagtgggagctgcagaaggagaacagcaaacgctggaacccagagattcagtacacttcaaactactacaaatctacaaatgtggactttgctgtcaatacagagggaacttattctgagcctcgccccattggtactcgttacctcacccgtaatctgtaa

SEQ ID NO: 261 - protein, 738 aa, Artificial Sequence
  source: /note="Description of Artificial Sequence: Synthetic polypeptide"
MAADGYLPDWLEDNLSEGIREWWDLKPGAPKPKANQQKQDDGRGLVLPGYKYLGPFNGLDKGEPVNAADAAALEHDKAYDQQLKAGDNPYLRYNHADAEFQERLQEDTSFGGNLGRAVFQAKKRVLEPLGLVEEAAKTAPGKKRPVEPSPQRSPDSSTGIGKKGQQPAKKRLNFGQTGDSESVPDPQPIGEPPAGPSGLGSGTMAAGGGAPMADNNEGADGVGSSSGNWHCDSTWLGDRVITTSTRTWALPTYNNHLYKQISNGTSGGSTNDNTYFGYSTPWGYFDFNRFHCHFSPRDWQRLINNNWGFRPKRLSFKLFNIQVKEVTQNEGTKTIANNLTSTIQVFTDSEYQLPYVLGSAHQGCLPPFPADVFMIPQYGYLTLNNGSQAVGRSSFYCLEYFPSQMLRTGNNFEFSYTFEDVPFHSSYAHSQSLDRLMNPLIDQYLYYLSRTQSTGGTQGTQQLLFSQAGPANMSAQAKNWLPGPCYRQQRVSTTLSQNNNSNFAWTGATKYHLNGRDSLVNPGVAMATHKDDEERFFPSSGVLMFGKQGAGRDNVDYSSVMLTSEEEIKTTNPVATEQYGVVADNLQQTNTGPIVGNVNSQGALPGMVWQNRDVYLQGPIWAKIPHTDGNCHPSPLMGGFGLKHPPPQILIKNTPVPADPPTTFSQAKLASFITQYSTGQVSVEIEWELQKENSKRWNPEIQYTSNYYKSTNVDFAVNTEGTYSEPRPIGTRYLTRNL

SEQ ID NO: 262 - protein, 738 aa, Artificial Sequence
  source: /note="Description of Artificial Sequence: Synthetic polypeptide"
MAADGYLPDWLEDNLSEGIREWWDLKPGAPKPKANQQKQDDGRGLVLPGYKYLGPFNGLDKGEPVNAADAAALEHDKAYDQQLKAGDNPYLRYNHADAEFQERLQEDTSFGGNLGRAVFQAKKRVLEPLGLVEEGAKTAPGKKRPVEPSPQRSPDSSTGIGKKGQQPARKRLNFGRTGDSESVPDPQPIGEPPAAPSSVGSGTMAAGGGAPMADNNEGADGVGSSSGNWHCDSTWLGDRVITTSTRTWALPTYNNHLYKQISNGTSGGSTNDNTYFGYSTPWGYLDFNRFHCHFSPRDWQRLINNNWGFRPKRLSFKLFNIQVKEVTQNEGTKTIANNLASTIQVFTDSEYQPPYVLGSAHQGCLPPFPADVFMIPQYGYLTLNNGSQAVGRSSFYCLEYFPSQMLRTGNNFSFSYTFEDVPFHSSYAHSQSLDRLMNPLIDQYLYYLSRTQSTGGTAGTQQLLFSRAGPSNMSAQARNWLPGPCYRQQRVSTTLSQNNNSNFAWTGATKYHLNGRDSLVNPGVAMATNKDDEDRFFPSSGILMFGKQGAGKDNVDYSNVMLTSEEEIKTTNPVATEQYGVVADNLQQQNTAPTVGAVNSQGALPGMVWQNRDVYLQGPIWAKIPHTDGNFHPSPLMGGFGLKHPPPQILIKNTPVPADPPTAFNQAKLNSFIAQYSTGQVSVEIEWELQKENSKRWNPEIQYTSNYYKSTNADFAVNTEGVYSEPRPIGTRYLTRNL

SEQ ID NO: 263 - DNA, 2217 bp, Artificial Sequence
  source: /note="Description of Artificial Sequence: Synthetic polynucleotide"
atggctgccgatggttatcttccagattggctcgaggacaacctctctgagggcattcgcgagtggtgggacctgaaacctggagccccgaaacccaaagccaaccagcaaaagcaggacgacggccggggtctggtgcttcctggctacaagtacctcggacccttcaacggactcgacaagggggagcccgtcaacgcggcggacgcagcggccctcgagcacgacaaggcctacgaccagcagctcaaagcgggtgacaatccgtacctgcggtataatcacgccgacgccgagtttcaggagcgtctgcaagaagatacgtcttttgggggcaacctcgggcgagcagtcttccaggccaagaagcgggttctcgaacctctcggtctggttgaggaaggcgctaagacggctcctggaaagaagagaccggtagagccgtcaccacagcgttcccccgactcctccacgggcatcggcaagaaaggccagcagcccgccagaaagagactcaatttcggtcggactggcgactcagagtcagtccccgaccctcaacctatcggagaacctccagcagcgccctctagtgtgggatctggtacaatggctgcaggcggtggcgcaccaatggcagacaataacgaaggtgccgacggagtgggtagttcctcgggaaattggcattgcgattccacatggctgggcgacagagttatcaccaccagcacccgaacctgggccctgcccacctacaacaaccacctctacaagcaaatctccaacgggacctcgggaggcagcaccaacgacaacacctactttggctacagcaccccctgggggtatcttgactttaacagattccactgccacttctcaccacgtgactggcagcgactcatcaacaacaactggggattccggcccaagagactcagcttcaagctcttcaacatccaggtcaaagaggtcacgcagaatgaaggcaccaagaccatcgccaataacctcgccagcaccatccaggtgtttacggactcggaataccagccgccgtacgtcctcggctctgcccaccagggctgcctgcctccgttcccggcggacgtcttcatgattcctcagtacggctacctgactctcaacaacggtagtcaggccgtgggacgttcctccttctactgcctggagtacttcccctctcagatgctgagaacgggcaacaacttttccttcagctacactttcgaggacgtgcctttccacagcagctacgcgcacagccagagtttggacaggctgatgaatcctctcatcgaccagtacctgtactacctgtcaagaacccagtctacgggaggcacagcgggaacccagcagttgctgttttctcgggccgggcctagcaacatgtcggctcaggccagaaactggctgcctggaccctgctacagacagcagcgcgtctccacgacactgtcgcaaaacaacaacagcaactttgcctggactggtgccaccaagtatcatctgaacggcagagactctctggtgaatccgggcgtcgccatggcaaccaacaaggacgacgaggaccgcttcttcccatccagcggcatcctcatgtttggcaagcagggagctggaaaagacaacgtggactatagcaacgtgatgctaaccagcgaggaagaaatcaagaccaccaaccccgtggccacagaacagtatggcgtggtggctgataacctacagcagcaaaacaccgctcctactgtgggggccgtcaacagccagggagccttacctggcatggtctggcagaaccgggacgtgtacctgcagggtcctatttgggccaagattcctcacacagatggcaactttcacccgtctcctttaatgggcggctttggacttaaacatccgcctcctcagatcctcatcaaaaacactcctgttcctgcggatcctccaacagcgttcaaccaggccaagctgaattctttcatcgcgcagtacagcaccggacaagtcagcgtggagatcgagtgggagctgcagaaggagaacagcaagcgctggaacccagagattcagtatacttccaactactacaaatctacaaatgcggactttgctgttaatactgagggtgtttactctgagcctcgccccattggcactcgttacctcacccgtaatctgtaa

SEQ ID NO: 264 - DNA, 2208 bp, Artificial Sequence
  source: /note="Description of Artificial Sequence: Synthetic polynucleotide"
atggctgccgatggttatcttccagattggctcgaggacactctctctgaaggaataagacagtggtggaagctcaaacctggcccaccaccaccaaagcccgcagagcggcataaggacgacagcaggggtcttgtgcttcctgggtacaagtacctcggacccttcaacggactcgacaagggggagccggtcaacgaggcagacgccgcggccctcgagcacgacaaggcctacgaccggcagctcgacagcggagacaacccgtacctcaagtacaaccacgccgacgcagagtttcaggagcgccttaaagaagatacgtcttttgggggcaacctcggacgagcagtcttccaggcgaaaaagagggttcttgaacctctgggcctggttgaggagcctgttaagacggctccgggaaaaaagaggccggtagagcactctcctgtggagccagactcctcctcgggaaccggaaaagcgggccagcagcctgcaagaaaaagattaaattttggtcagactggagacgcagactccgtacctgacccccagcctctcggacagccaccagcagccccctctggtctgggatctactacaatggctacaggcagtggcgcaccaatggcagacaataacgagggtgccgatggagtgggtaattcctcaggaaattggcattgcgattcccaatggctgggcgacagagtcatcaccaccagcacccgaacctgggccctgcccacatacaacaaccacctctacaagcaaatctccagccaatcaggagccagcaacgacaaccactactttggctacagcaccccctgggggtattttgacttcaacagattccactgccacttttcaccacgtgactggcaaagactcgtcaacaacaaccggggattccggcccaaaagactcaacttcaagctctttaatattcaagtcaaagaggtcacgcagaatgacggtacgacgacgattgccaataaccttaccagcacggttcaggtgtttactgactcggagtaccagctcccgtacgtcctgggctcggcgcatcaaggatgcctcccgccgtttccagcggacgtcttcatggtcccacagtatggatacctcaccctgaacaacgggagtcaggcggtaggacgctcttccttttactgcctggagtactttccttctcagatgctgcgtactggaaacaactttcagttcagctacacttttgaagacgtgcctttccacagcagctacgctcacagccagagtctggatcggctgatgaatcctctgatcgaccagtacctgtattatctgaacaagacacaaacaaatagtggaactcttcagcagtctcggctactgtttagccaagctggaccaaccaacatgtctcttcaagctaaaaactggctgcctggaccttgctacagacagcagcgtctgtcaaaacaggcaaacgacaacaacaacagcaactttccctggactgcagctacaaagtatcatctaaatggccgggactcgttggttaatccaggaccagctatggccagtcacaaggatgacgaagaaaagtttttccccatgcatggaaccctgatatttggtaaacaaggaacaaatgccaacgacgcggatttggaaaatgtcatgattacagatgaagaagaaatcagggccaccaatcccgtggctacggagcagtacgggactgtgtcaaataatttgcaaaactcaaacactggtccaactactggaactgtcaatcaccaaggagcgttacctggtatggtgtggcaggatcgagacgtgtacctgcagggacccatttgggccaagattcctcacaccgatggacactttcatccttctccactgatgggaggttttggactcaaacacccgcctcctcagatcatgatcaaaaacactcccgttccagccaatcctcccacaaacttcagttctgccaagtttgcttctttcatcacacagtattccacgggacaggtcagcgtggagatcgagtgggagctgcagaaggagaacagcaaacgctggaatcccgaaattcagtacacttccaactacaacaagtctgttaatgtggactttactgtggacactaatggtgtgtattcagagcctcgccccattggcaccagatacctgactcgtaatctgtaa

SEQ ID NO: 265 - protein, 735 aa, Artificial Sequence
  source: /note="Description of Artificial Sequence: Synthetic polypeptide"
MAADGYLPDWLEDTLSEGIRQWWKLKPGPPPPKPAERHKDDSRGLVLPGYKYLGPFNGLDKGEPVNEADAAALEHDKAYDRQLDSGDNPYLKYNHADAEFQERLKEDTSFGGNLGRAVFQAKKRVLEPLGLVEEPVKTAPGKKRPVEHSPVEPDSSSGTGKAGQQPARKRLNFGQTGDADSVPDPQPLGQPPAAPSGLGSTTMATGSGAPMADNNEGADGVGNSSGNWHCDSQWLGDRVITTSTRTWALPTYNNHLYKQISSQSGASNDNHYFGYSTPWGYFDFNRFHCHFSPRDWQRLVNNNRGFRPKRLNFKLFNIQVKEVTQNDGTTTIANNLTSTVQVFTDSEYQLPYVLGSAHQGCLPPFPADVFMVPQYGYLTLNNGSQAVGRSSFYCLEYFPSQMLRTGNNFQFSYTFEDVPFHSSYAHSQSLDRLMNPLIDQYLYYLNKTQTNSGTLQQSRLLFSQAGPTNMSLQAKNWLPGPCYRQQRLSKQANDNNNSNFPWTAATKYHLNGRDSLVNPGPAMASHKDDEEKFFPMHGTLIFGKQGTNANDADLENVMITDEEEIRATNPVATEQYGTVSNNLQNSNTGPTTGTVNHQGALPGMVWQDRDVYLQGPIWAKIPHTDGHFHPSPLMGGFGLKHPPPQIMIKNTPVPANPPTNFSSAKFASFITQYSTGQVSVEIEWELQKENSKRWNPEIQYTSNYNKSVNVDFTVDTNGVYSEPRPIGTRYLTRNL

SEQ ID NO: 266 - protein, 738 aa, Artificial Sequence
  source: /note="Description of Artificial Sequence: Synthetic polypeptide"
MAADGYLPDWLEDNLSEGIREWWDLKPGAPKPKANQQKQDDGRGLVLPGYKYLGPFNGLDKGEPVNAADAAALEHDKAYDQQLKAGDNPYLRYNHADAEFQERLQEDTSFGGNLGRAVFQAKKRVLEPLGLVEEAAKTAPGKKRPVEPSPQRSPDSSTGIGKKGQQPAKKRLSFGQTGDSESVPDPQPIGEPPAGPSGLGSGTMAAGGGAPMADNNEGADGVGSSSGNWHCDSTWLGDRVITTSTRTWALPTYNNHLYKQISNGTSGGSTNDNTYFGYSTPWGYFDFNRFHCHFSPRDWQRLINNNWGFRPKRLSFKLFNIQVKEVTQNEGTKTIANNLTSTIQVFTDSEYQLPYVLGSAHQGCLPPFPADVFMIPQYGYLTLNNGSQAVGRSSFYCLEYFPSQMLRTGNNSEFSYTFEDVPFHSSYAHSQSLDRLMNPLIDQYLYYLSRTQSTGGTQGTQQLLFSQAGPANMSAQAKNWLPGPCYRQQRVSTTLSQNNNSNFAWTGATKYHLNGRDSLVNPGVAMATHKDDEERFFPSSGVLMFGKQGAGRDNVDYSSVMLTSEEEIKTTNPVATEQYGVVADNLQQTNTGPIVGNVNSQGALPGMVWQNRDVYLQGPIWAKIPHTDGNFHPSPLMGGFGLKHPPPQILIKNTPVPADPPTTFSQAKLASFITQYSTGQVSVEIEWELQKENSKRWNPEIQYTSNYYKSTNVDFAVNTEGTYSEPRPIGTRYLTRNL

SEQ ID NO: 267 - DNA, 2217 bp, Artificial Sequence
  source: /note="Description of Artificial Sequence: Synthetic polynucleotide"
atggctgctgacggttatcttccagattggctcgaggacaacctctctgagggcattcgcgagtggtgggacctgaaacctggagcccccaagcccaaggccaaccagcagaagcaggacgacggccggggtctggtgcttcctggctacaagtacctcggacccttcaacggactcgacaagggggagcccgtcaacgcggcggacgcagcggccctcgagcacgacaaggcctacgaccagcagctcaaagcgggtgacaatccgtacctgcggtataaccacgccgacgccgagtttcaggagcgtctgcaagaagatacgtcttttgggggcaacctcgggcgagcagtcttccaggccaagaagcgggttctcgaacctctcggtctggttgaggaagctgctaagacggctcctggaaagaagagaccggtagaaccgtcacctcagcgttcccccgactcctccacgggcatcggcaagaaaggccagcagcccgctaaaaagagactgagctttggtcagactggcgactcagagtcagtccccgaccctcaaccaatcggagaaccaccagcaggcccctctggtctgggatctggtacaatggctgcaggcggtggcgctccaatggcagacaataacgaaggcgccgacggagtgggtagttcctcaggaaattggcattgcgattccacatggctgggcgacagagtcatcaccaccagcacccgaacctgggccctgcccacctacaacaaccacctctacaagcaaatatccaatgggacatcgggaggaagcaccaacgacaacacctacttcggctacagcaccccctgggggtattttgacttcaacagattccactgccacttctcaccacgtgactggcagcgactcatcaacaacaactggggattccggccaaaaagactcagcttcaagctcttcaacatccaggtcaaggaggtcacgcagaatgaaggcaccaagaccatcgccaataaccttaccagcacgattcaggtatttacggactcggaataccagctgccgtacgtcctcggctccgcgcaccagggctgcctgcctccgttcccggcggacgtcttcatgattccccagtacggctaccttacactgaacaatggaagtcaagccgtaggccgttcctccttctactgcctggaatattttccatctcaaatgctgcgaactggaaacaattctgaattcagctacaccttcgaggacgtgcctttccacagcagctacgcacacagccagagcttggaccgactgatgaatcctctcatcgaccagtacctgtactacttatccagaactcagtccacaggaggaactcaaggtacccagcaattgttattttctcaagctgggcctgcaaacatgtcggctcaggctaagaactggctacctggaccttgctaccggcagcagcgagtctctacgacactgtcgcaaaacaacaacagcaactttgcttggactggtgccaccaaatatcacctgaacggaagagactctttggtaaatcccggtgtcgccatggcaacccacaaggacgacgaggaacgcttcttcccgtcgagtggagtcctgatgtttggaaaacagggtgctggaagagacaatgtggactacagcagcgttatgctaaccagcgaagaagaaattaaaaccactaaccctgtagccacagaacaatacggtgtggtggctgacaacttgcagcaaaccaatacagggcctattgtgggaaatgtcaacagccaaggagccttacctggcatggtctggcagaaccgagacgtgtacctgcagggtcccatctgggccaagattcctcacacggacggcaacttccacccttcaccgctaatgggaggatttggactgaagcacccacctcctcagatcctgatcaagaacacgccggtacctgcggatcctccaacaacgttcagccaggcgaaattggcttccttcattacgcagtacagcaccggacaggtcagcgtggaaatcgagtgggagctgcagaaggagaacagcaaacgctggaacccagagattcagtacacttcaaactactacaaatctacaaatgtggactttgctgtcaatacagagggaacttattctgagcctcgccccattggtactcgttacctcacccgtaatctgtaa

SEQ ID NO: 268 - protein, 738 aa, Artificial Sequence
  source: /note="Description of Artificial Sequence: Synthetic polypeptide"
MAADGYLPDWLEDNLSEGIREWWDLKPGAPKPKANQQKQDDGRGLVLPGYKYLGPFNGLDKGEPVNAADAAALEHDKAYDQQLKAGDNPYLRYNHADAEFQERLQEDTSFGGNLGRAVFQAKKRVLEPLGPVEEAAKTAPGKKRPVEPPPQRSPDSSTGIGKKGQQPAKKRLNFGQTGDSESVPDPQPIGEPPAGPSGLGSGTMAAGGGAPMADNNEGADGVGSSSGNWHCDSTWLGDRVITTSTRTWALPTYNNHLYKQISNGTSGGSTNDNTYFGYSTPWGYFDFNRFHCHFSPRDWQRLINNNWGFRPKRLSFKLFNIQVKEVTQNEGTKTVANNLTSTIQVFTDSEYQLPYVLGSAHQGCLPPFPADVFMIPQYGYLTLNNGSQAVGRSSFYCLEYFPSQMLRTGNNFEFSYTFEDVPFHSSYAHSQSLDRLMNPLIDQYLYYLSRTQSTGGTQGTQQLLFSQAGPANMSAQAKNWLPGPCYRQQRVSTTLSQNNNSNFAWTGATKYHLNGRDSLVNPGVAMATHKDDEERFFPSSGVLMFGKQGAGRDNVDYSSVMLTSEEEIKTTNPVATEQYGVVADNLQQTNTGPIVGNVNSQGALPGMVWQNRDVYLQGPIWAKIPHTDGNFHPSPLMGGFGLKHPPPQILIKNTPVPADPPTTFSQAKLASFITQYSTGQVSVEIEWELQKENSKRWNPEIQYTSNYYKSTNVDFAVNTEGTYSEPRPIGTRYLTRNL

SEQ ID NO: 269 - DNA, 2217 bp, Artificial Sequence
  source: /note="Description of Artificial Sequence: Synthetic polynucleotide"
atggctgctgacggttatcttccagattggctcgaggacaacctctctgagggcattcgcgagtggtgggacctgaaacctggagcccccaagcccaaggccaaccagcagaagcaggacgacggccggggtctggtgcttcctggctacaagtacctcggacccttcaacggactcgacaagggggagcccgtcaacgcggcggacgcagcggccctcgagcacgacaaggcctacgaccagcagctcaaagcgggtgacaatccgtacctgcggtataaccacgccgacgccgagtttcaggagcgtctacaagaagatacgtcttttgggggcaacctcgggcgagcagtcttccaggccaagaagcgggttctcgaacctctcggtccggttgaggaagctgctaagacggctcctggaaagaagagaccggtagaaccgccacctcagcgttcccccgactcctccacgggcatcggcaagaaaggccagcagcccgctaaaaagagactgaactttggtcagactggcgactcagagtcagtccccgaccctcaaccaatcggagaaccaccagcaggcccctctggtctgggatctggtacaatggctgcaggcggtggcgctccaatggcagacaataacgaaggcgccgacggagtgggtagttcctcaggaaattggcattgcgattccacatggctgggcgacagagtcatcaccaccagcacccgaacctgggccctgcccacctacaacaaccacctctacaagcaaatatccaatgggacatcgggaggaagcaccaacgacaacacctacttcggctacagcaccccctgggggtattttgacttcaacagattccactgccacttctcaccacgtgactggcagcgactcatcaacaacaactggggattccggccaaaaagactcagcttcaagctcttcaacatccaggtcaaggaggtcacgcagaatgaaggcaccaagaccgtcgccaataaccttaccagcacgattcaggtatttacggactcggaataccagctgccgtacgtcctcggctccgcgcaccagggctgcctgcctccgttcccggcggacgtcttcatgattccccagtacggctaccttacactgaacaatggaagtcaagccgtaggccgttcctccttctactgcctggaatattttccatctcaaatgctgcgaactggaaacaattttgaattcagctacaccttcgaggacgtgcctttccacagcagctacgcacacagccagagcttggaccgactgatgaatcctctcatcgaccagtacctgtactacttatccagaactcagtccacaggaggaactcaaggtacccagcaattgttattttctcaagctgggcctgcaaacatgtcggctcaggctaagaactggctacctggaccttgctaccggcagcagcgagtctctacgacactgtcgcaaaacaacaacagcaactttgcttggactggtgccaccaaatatcacctgaacggaagagactctttggtaaatcccggtgtcgccatggcaacccacaaggacgacgaggaacgcttcttcccgtcgagtggagtcctgatgtttggaaaacagggtgctggaagagacaatgtggactacagcagcgttatgctaaccagcgaagaagaaattaaaaccactaaccctgtagccacagaacaatacggtgtggtggctgacaacttgcagcaaaccaatacagggcctattgtgggaaatgtcaacagccaaggagccttacctggcatggtctggcagaaccgagacgtgtacctgcagggtcccatctgggccaagattcctcacacggacggcaacttccacccttcaccgctaatgggaggatttggactgaagcacccacctcctcagatcctgatcaagaacacgccggtacctgcggatcctccaacaacgttcagccaggcgaaattggcttccttcattacgcagtacagcaccggacaggtcagcgtggaaatcgagtgggagctgcagaaggagaacagcaaacgttggaacccagagattcagtacacttcaaactactacaaatctacaaatgtggactttgctgtcaatacagagggaacttattctgagcctcgccccattggtactcgttacctcacccgtaatctgtaa

SEQ ID NO: 270 - protein, 738 aa, Artificial Sequence
  source: /note="Description of Artificial Sequence: Synthetic polypeptide"
MAADGYLPDWLEDNLSEGIREWWDLKPGAPKPKANQQKQDDGRGLVLPGYKYLGPFNGLDKGEPVNAADAAALEHDKAYDQQLKAGDNPYLRYNHADAEFQERLQEDTSFGGNLGRAVFQAKKRVLEPLGLVEEAAKTAPGKKRPVEPSPQRSPDSSTGIGKKGQQPAKKRLNFGQTGDSESVPDPQPIGEPPAGPSGLGSGTMAAGGGAPMADNNEGADGVGSSSGNWHCDSTWLGDRVITTSTRTWALPTYNNHLYKQISNGTSGGSTNDNTYFGYSTPWGYFDFNRFHCHFSPRDWQRLINNNWGFRPKRLSFKLFNIQVKEVTQNEGTKTIANNLTSTIQVFTDSEYQLPYVLGSAHQGCLPPFPADVFMIPQYGYLTLNNGSQAVGRSSFYCLEYFPSQMLRTGNNFEFSYTFEDVPFHSSYAHSQSLDRLMNPLIDQYLYYLSRTQSTGGTQGTQQLLFSQAGPANMSAQAKNWLPGPCYRQQRVSTTLSQSNNSNFAWTGATKYHLNGRDSLVNPGVAMATHKDDEERFFPSSGVLMFGKQGAGRDNVDYSSVMLTSEEEIKTTNPVATEQYGVVADNLQQTNTGPIVGNVNSQGALPGMVWQNRDVYLQGPIWAKIPHTDGNFHPSPLMGGLGLKHPPPQILIKNTPVPADPPTTFSQAKLASFITQYSTGQVSVEIEWELQKENSKRWNPEIQYTSNYYKSTNVDFAVNTEGTYSEPRPIGTRYLTRNL

SEQ ID NO: 271 - DNA, 2217 bp, Artificial Sequence
  source: /note="Description of Artificial Sequence: Synthetic polynucleotide"
atggctgctgacggttatcttccagattggctcgaggacaacctctctgagggcattcgcgagtggtgggacctgaaacctggagcccccaagcccaaggccaaccagcagaagcaggacgacggccggggtctggtgcttcctggctacaagtacctcggacccttcaacggactcgacaagggggagcccgtcaacgcggcggacgcagcggccctcgagcacgacaaggcctacgaccagcagctcaaagcgggtgacaatccgtacctgcggtataaccacgccgacgccgagtttcaggagcgtctgcaagaagatacgtcttttgggggcaacctcgggcgagcagtcttccaggccaagaagcgggttctcgaacctctcggtctggttgaggaagcggctaagacggctcctggaaagaagagaccggtagaaccgtcacctcagcgttcccccgactcctccacgggcatcggcaagaaaggccagcagcccgctaaaaagagactgaactttggtcagactggcgactcagagtcagtccccgaccctcaaccaatcggagaaccaccagcaggcccctctggtctgggatctggtacaatggctgcaggcggtggcgctccaatggcagacaataacgaaggcgccgacggagtgggtagttcctcaggaaattggcattgcgattccacatggctgggcgacagagtcatcaccaccagcacccgaacctgggccctgcccacctacaacaaccacctctacaagcaaatatccaatgggacatcgggaggaagcaccaacgacaacacctacttcggctacagcaccccctgggggtattttgacttcaacagattccactgccacttctcaccacgtgactggcagcgactcatcaacaacaactggggattccggccaaaaagactcagcttcaagctcttcaacatccaggtcaaggaggtcacgcagaatgaaggcaccaagaccatcgccaataaccttaccagcacgattcaggtatttacggactcggaataccagctgccgtacgtcctcggctccgcgcaccagggctgcctgcctccgttcccggcggacgtcttcatgattccccagtacggctaccttacactgaacaatggaagtcaagccgtaggccgttcctccttctactgcctggaatattttccatctcaaatgctgcgaactggaaacaattttgaattcagctacaccttcgaggacgtgcctttccacagcagctacgcacacagccagagcttggaccgactgatgaatcctctcatcgaccagtacctgtactacttatccagaactcagtccacaggaggaactcaaggtacccagcaattgttattttctcaagctgggcctgcaaacatgtcggctcaggctaagaactggctacctggaccttgctaccggcagcagcgagtctctacgacactgtcgcaaagcaacaacagcaactttgcttggactggtgccaccaaatatcacctgaacggaagagactctttggtaaatcccggtgtcgccatggcaacccacaaggacgacgaggaacgcttcttcccgtcgagtggagtcctgatgtttggaaaacagggtgctggaagagacaatgtggactacagcagcgttatgctaaccagcgaagaagaaattaaaaccactaaccctgtagccacagaacaatacggtgtggtggctgacaacttgcagcaaaccaatacagggcctattgtgggaaatgtcaacagccaaggagccttacctggcatggtctggcagaaccgagacgtgtacctgcagggtcccatctgggccaagattcctcacacggacggcaacttccacccttcaccgctaatgggaggacttggactgaagcacccacctcctcagatcctgatcaagaacacgccggtacctgcggatcctccaacaacgttcagccaggcgaaattggcttccttcattacgcagtacagcaccggacaggtcagcgtggaaatcgagtgggagctgcagaaggagaacagcaaacgctggaacccagagattcagtacacttcaaactactacaaatctacaaatgtggactttgctgtcaatacagagggaacttattctgagcctcgccccattggtactcgttacctcacccgtaatctgtaa

SEQ ID NO: 272 - protein, 737 aa, Artificial Sequence
  source: /note="Description of Artificial Sequence: Synthetic polypeptide"
MAADGYLPDWLEDNLSEGIREWWDLKPGAPKPKANQQKQDDGRGLVLPGYKYLGPFNGLDKGEPVNAADAAALEHDKAYDQQLKAGDNPYPRYNHADAEFQERLQEDTPFGGNLGRAVFQAKKRVLEPLGLVEEAAKTAPGKKRPVEPSPQRSPDSSTGIGKKGQQPAKKRLNFGQTGDSESVPDPQPIGEPPAGPSGLGSGTMAAGGGAPMADNNEGADGVGNASGNWHCDSTWLGDRVITTSTRTWALPTYNNHLYKQISSASTGASNDNHYFGYSTPWGYFDFNRFHCHFSPRDWQRLINNNWGFRPKRLNFKLFNIQVKEVTTNDGVTTIANNLTSTVQVFSDSEYQLPYVLGSAHQGCLPPFPADVFMIPQYGYLTLNNGSQAVGRSSFYCLEYFPSQMLRTGNNFTFSYTFEEVPLHSSYAHSQSLDRLMNPLIVQYLYYLNRTQNQSGSAQNKDLLFSRGSPAGMSVQPKNWLPGPCYRQQRVSKTKTDNNNSNFTWTGASKYNLNGRESIINPGTAMASHKDDEDKFFPMSGVMIFGKESAGASNTALDNVMITDEEEIKATNPVATERFGTVAVNFQSSSTDPATGDVHAMGALPGMVWQDRDVYLQGPIWAKIPHTDGHFHPSPLMGGFGLKNPPPQILIKNTPVPANPPAEFSATKFASFITQYSTGQVSVEIEWELQKENSKRWNPEVQYTSNYAKSASVDFTVDNNGLYTEPRPIGTRYLTRPL

SEQ ID NO: 273 - protein, 737 aa, Artificial Sequence
  source: /note="Description of Artificial Sequence: Synthetic polypeptide"
MAADGYLPDWLEDNLSEGIREWWDLKPGAPKPKANQQKQDDGRGLVLPGYKYLGPFNGLDKGEPVNAADAAALEHDKAYDQQLKAGDNPYPRYNHADAEFQERLQEDTSFGGNLGRAVFQAKKRVLEPLGLVEEAAKTAPGKKRPVEPSPQRSPDSSTGIGKKGQQPAKKRLNFGQTGDSESVPDPQPIGEPPAGPSGLGSGTMAAGGGAPMADNNEGADGVGNASGNWHCDSTWLGDRVITTSTRTWALPTYNNHLYKQISSASTGASNDNHYFGYSTPWGYFDFNRFHCHFSPRDWQRLINNNWGFRPKRLNFKLFNIQVKEVTTNDGVTTIANNLTSTVQVFSDSEYQLPYVLGSAHQGCLPPFPADVFMIPQYGYLTLNNGSQAVGRSSFYCLEYFPSQMLRTGNNFTFSYTFEEVPLHSSYAHSQSLDRLMNPLIDQYLYYLNRTQNQSGSAQNKDLLFSRGSPAGMSVQPKNWLPGPCYRQQRVSKTKTDNNNSNFTWTGASKYNLNGRESIINPGTAMASHKDDEDKFFPMSGVMIFGKESAGASNTALDNVMITDEEEIKATNPVATERFGTVAVNFQSSSTDPATGDVHAMGALPGMVWQDRDVYLQGPIWAKIPHTDGHFHPSPLMGGFGLKNPPPQILIKNTPVPANPPAEFSATKFASFITQYSTGQVSVEIEWELQKENSKRWNPEVQYTSNYAKSASVDFTVDNNGLYTEPRPIGTRYLTRPL

SEQ ID NO: 274 - DNA, 2214 bp, Artificial Sequence
  source: /note="Description of Artificial Sequence: Synthetic polynucleotide"
atggctgctgacggttatcttccagattggctcgaggacaacctctctgagggcattcgcgagtggtgggacctgaaacctggagcccccaagcccaaggccaaccagcagaagcaggacgacggccggggtctggtgcttcctggctacaagtacctcggacccttcaacggactcgacaagggggagcccgtcaacgcggcggacgcagcggccctcgagcacgacaaggcctacgaccagcagctcaaagcgggtgacaatccgtacccgcggtataaccacgccgacgccgagtttcaggagcgtctgcaagaagatacgccttttgggggcaacctcgggcgagcagtcttccaggccaagaagcgggttctcgaacctctcggtctggttgaggaagctgctaagacggctcctggaaagaagagaccggtagaaccgtcacctcagcgttcccccgactcctccacgggcatcggcaagaaaggccagcagcccgctaaaaagagactgaactttggtcagactggcgactcagagtcagtccccgaccctcaaccaatcggagaaccaccagcaggcccctctggtctgggatctggtacaatggctgcaggcggtggcgctccaatggcagacaataacgaaggcgccgacggagtgggtaatgcctcaggaaattggcattgcgattccacatggctgggcgacagagtcatcaccaccagcacccgcacctgggccttgcccacctacaataaccacctctacaagcaaatctccagtgcttcaacgggggccagcaacgacaaccactacttcggctacagcaccccctgggggtattttgatttcaacagattccactgccacttttcaccacgtgactggcagcgactcatcaacaacaattggggattccggcccaagagactcaacttcaaactcttcaacatccaagtcaaggaggtcacgacgaatgatggcgtcacaaccatcgctaataaccttaccagcacggttcaagtcttctcggactcggagtaccagcttccgtacgtcctcggctctgcgcaccagggctgcctccctccgttcccggcggacgtgttcatgattccgcaatacggctacctgacgctcaacaatggcagccaagccgtgggacgttcatccttttactgcctggaatatttcccttctcagatgctgagaacgggcaacaactttaccttcagctacacctttgaggaagtgcctctccacagcagctacgcgcacagccagagcctggaccggctgatgaatcctctcatcgtccaatacctgtattacctgaacagaactcaaaatcagtccggaagtgcccaaaacaaggacttgctgttcagccgtgggtctccagctggcatgtctgttcagcccaaaaactggctacctggaccctgttatcggcagcagcgcgtttctaaaacaaaaacagacaacaacaacagcaattttacctggactggtgcttcaaaatataacctcaatgggcgtgaatccatcatcaaccctggcactgctatggcctcacacaaagacgacgaagacaagttctttcccatgagcggtgtcatgatttttggaaaagagagcgccggagcttcaaacactgcattggacaatgtcatgattacagacgaagaggaaattaaagccactaaccctgtggccaccgaaagatttgggaccgtggcagtcaatttccagagcagcagcacagaccctgcgaccggagatgtgcatgctatgggagcattacctggcatggtgtggcaagatagagacgtgtacctgcagggtcccatttgggccaaaattcctcacacagatggacactttcacccgtctcctcttatgggcggctttggactcaagaacccgcctcctcagatcctcatcaaaaacacgcctgttcctgcgaatcctccggcggagttttcagctacaaagtttgcttcattcatcacccaatactccacaggacaagtgagtgtggaaattgaatgggagctgcagaaagaaaacagcaagcgctggaatcccgaagtgcagtacacatccaattatgcaaaatctgccagcgttgattttactgtggacaacaatggactttatactgagcctcgccccattggcacccgttaccttacccgtcccctgtaa

SEQ ID NO: 275 - protein, 736 aa, Artificial Sequence
  source: /note="Description of Artificial Sequence: Synthetic polypeptide"
MAADGYLPDWLEDTLSEGIRQWWKLRPGPPPPKPAERHKDDSRGLVLPGYKYLGPFNGLDKGEPVNEADAAALEHDKAYDRQLDSGDNPYLKYNHADAEFQERLKEDTSFGGNLGRAVFQAKKRVLEPLGLVEEGAETAPGKKRPVEQSPQGPDSSSGIGKTGQQPAKKRLNFGQTGDSESVPDPQPLGEPPATPAAVGPTTMASGGGAPMADNNEGADGVGNASGNWHCDSTWLGDRVITTSTRTWALPTYNNHLYKQISSASTGASNDNHYFGYSTPWGYFDFNRFHCHFSPRDWQRLINNNWGFRPKRLNFKLFNIQVKEVTTNDGVTTIANNLTSTVQVFSDSEYQLPYVLGSAHQGCLPPFPADVFMIPQYGYLTLNNGSQAVGRSSFYCLEYFPSQMLRTGNNFTFSYTFEEVPFHSSYAHSQSLDRLMNPLIDQYLYYPNRTQNQSGSAQNKDLLFSRGSPAGMSVQPKNWLPGPCYRQQRVSKTKTDNNNSNFTWTGASKYNLNGRESIINPGTAMASHKDDEDKFFPMSGVMIFGKESAGASNTALDNVMITDEEEIKATNPVATERFGTVAVNFQSSSTDPATGDVHAMGALPGMVWQGRDVYLQGPIWAKIPHTDGHFHPSPLMGGFGLKNPPPQILIKNTPVPANPPAEFSATKFASFITQYSTGQVSVEIEWELQKENSKRWNPEVQYTSNYAKSANVDFTVDNNGLYTEPRPIGTRYLTRPL

SEQ ID NO: 276 - DNA, 2211 bp, Artificial Sequence
  source: /note="Description of Artificial Sequence: Synthetic polynucleotide"
atggctgccgatggttatcttccagattggctcgaggacactctctctgaaggaataagacagtggtggaagctcagacctggcccaccaccaccaaagcccgcagagcggcataaggacgacagcaggggtcttgtgcttcctgggtacaagtacctcggacccttcaacggactcgacaagggagagccggtcaacgaggcagacgccgcggccctcgagcacgacaaagcctacgaccggcagctcgacagcggagacaacccgtacctcaagtacaaccacgccgacgcggagtttcaggagcgccttaaagaagatacgtcttttgggggcaacctcgggcgagcagtcttccaggccaagaagcgggttctcgaacctctcggtctggttgaggaaggcgctgagacggctcctggaaagaaacgtccggtagagcagtcgccacaagggccagactcctcctcgggcatcggcaagacaggccagcagcccgctaaaaagagactcaattttggtcagactggcgactcagagtcagtccccgatccacaacctctcggagaacctccagcaacccccgctgctgtgggacctactacaatggcttcaggcggtggcgcaccaatggcagacaataacgaaggcgccgacggagtgggtaatgcctcaggaaattggcattgcgattccacatggctgggcgacagagtcatcaccaccagcacccgcacctgggccttgcccacctacaataaccacctctacaagcaaatctccagtgcttcaacgggggccagcaacgacaaccactacttcggctacagcaccccctgggggtattttgatttcaacagattccactgccacttttcaccacgtgactggcagcgactcatcaacaacaattggggattccggcccaagagactcaacttcaaactcttcaacatccaagtcaaggaggtcacgacgaatgatggcgtcacaaccatcgctaataaccttaccagcacggttcaagtcttctcggactcggagtaccagcttccgtacgtcctcggctctgcgcaccagggctgcctccctccgttcccggcggacgtgttcatgattccgcaatacggctacctgacgctcaacaatggcagccaagccgtgggacgttcatccttttactgcctggaatatttcccttctcagatgctgagaacgggcaacaactttaccttcagctacacctttgaggaagtgcctttccacagcagctacgcgcacagccagagcctggaccggctgatgaatcctctcatcgaccaatacctgtattacccgaacagaactcaaaatcagtccggaagtgcccaaaacaaggacttgctgtttagccgtgggtctccagctggcatgtctgttcagcccaaaaactggctacctggaccctgttatcggcagcagcgcgtttctaaaacaaaaacagacaacaacaacagcaattttacctggactggtgcttcaaaatataacctcaatgggcgtgaatccatcatcaaccctggcactgctatggcctcacacaaagacgacgaagacaagttctttcccatgagcggtgtcatgatttttggaaaagagagcgccggagcttcaaacactgcattggacaatgtcatgattacagacgaagaggaaattaaagccactaaccctgtggccaccgaaagatttgggaccgtggcagtcaatttccagagcagcagcacagaccctgcgaccggagatgtgcatgctatgggagcattacctggcatggtgtggcaaggtagagacgtgtacctgcagggtcccatttgggccaaaattcctcacacagatggacactttcacccgtctcctcttatgggcggctttggactcaagaacccgcctcctcagatcctcatcaaaaacacgcctgttcctgcgaatcctccggcggagttttcagctacaaagtttgcttcattcatcacccaatactccacaggacaagtgagtgtggaaattgaatgggagctgcagaaagaaaacagcaagcgctggaatcccgaagtgcagtacacatccaattatgcaaaatctgccaacgttgattttactgtggacaacaatggactttatactgagcctcgccccattggcacccgttaccttacccgtcccctgtaa

SEQ ID NO: 277 - protein, 736 aa, Artificial Sequence
  source: /note="Description of Artificial Sequence: Synthetic polypeptide"
MAADGYLPDWLEDTLSEGIRQWWKLRPGPPPPKPAERHKDDSRGLVLPGYKYLGPFNGLDKGEPVNEADAAALEHDKAYDRQLDSGDNPYLKYNHADAEFQERLKEDTSFGGNLGRAVFQAKKRVLEPLGLVEEGAKTAPGKKRPVEQSPQGPDSSSGIGKTGQQPAKKRLNFGQTGDSESVPDPQPLGEPPATPAAVGPTTMASGGGAPMADNNEGADGVGNASGNWHCDSTWLGDRVITTSTRTWALPTYNNHLYKQISSASTGASNDNHYFGYSTPWGYFDFNRFHCHFSPRDWQRLINNNWGFRPKRLNFKLFNIQVKEVTTNDGVTTIANNLTSTVQVFSDSEYQLPYVLGSAHQGCLPPFPADVFMIPQYGYLTLNNGSQAVGRSSFYCLEYFPSQMLRTGNNFTFSYTFEEVPFHSSYAHSQSLDRLMNPLIDQYLYYPNRTQNQSGSAQNKDLLFSRGSPAGMSVQPKNWLPGPCYRQQRVSKTKTDNNNSNFTWTGASKYNLNGRESIINPGTAMASHKDDEDKFFPMSGVMIFGKESAGASNTALDNVMITDEEEIKATNPVATERFGTVAVNFQSSSTDPATGDVHAMGALPGMVWQGRDVYLQGPIWAKIPHTDGHFHPSPLMGGFGLKNPPPQILIKNTPVPANPPAEFSATKFASFITQYSTGQVSVEIEWELQKENSKRWNPEVQYTSNYAKSANVDFTVDNNGLYTEPRPIGTRYLTRPL

SEQ ID NO: 278 - protein, 736 aa, Artificial Sequence
  source: /note="Description of Artificial Sequence: Synthetic polypeptide"
MAADGYLPDWLEDTLSEGIRQWWKLRPGPPPPKPAERHKDDSRGLVLPGYKYLGPFNGLDKGEPVNEADAAALEHDKAYDRQLDSGDNPYLKYNHADAEFQERLKEDTSFGGNLGRAVFQAKKRVLEPLGLVEEGAKTAPGKKRPVEQSPQGPDSSSGIGKTGQQPAKKRLNFGQTGDSESVPDPQPLGEPPATPAAVGPTTMASGGGAPMADNNEGADGVGNASGNWHCDSTWLGDRVITTSTRTWALPTYNNHLYKQISSASTGASNDNHYFGYSTPWGYFDFNRFHCHFSPRDWQRLINNNWGFRPKRLNFKLFNIQVKEVTTNDGVTTIANNLTSTVQVFSDSEYQLPYVLGSAHQGCLPPFPADVFMIPQYGYLTLNNGSQAVGRSSFYCLEYFPSQMLRTGNNFTFSYTFEEVPFHSSYAHSQSLDRLMNPLIDQYLYYLNRTQNQSGSAQNKDLLFSRGSPAGMSVQPKNWLPGPCYRQQRVSKTKTDNNNSNFTWTGASKYNLNGRESIINPGTAMASHKDDEDKFFPMSGVMIFGKESAGASNTALDNVMITDEEEIKATNPVATERFGTVAVNFQSSSTDPATGDVHAMGALPGMVWQGRDVYLQGPIWAKIPHTDGHFHPSPLMGGFGLKNPPPQILIKNTPVPANPPAEFSATKFASFITQYSTGQVSVEIEWELQKENSKRWNPEVQYTSNYAKSANVDFTVDNNGLYTEPRPIGTRYLTRPL

SEQ ID NO: 279 - protein, 736 aa, Artificial Sequence
  source: /note="Description of Artificial Sequence: Synthetic polypeptide"
MAADGYLPDWLEDTLSEGIRQWWKLRPGPPPPKPAERHKDDSRGLVLPGYKYLGPFNGLDKGEPVNEADAAALEHDKAYDRQLDSGDNPYLKYNHADAEFQERLKEDTSFGGNLGRAVFQAKKRVLEPLGLVEEGAKTAPGKKRPVEQSPQGPDSSSGIGKTGQQPAKKRLNFGQTGDSESVPDPQPLGEPPATPAAVGPTTMASGGGAPMADNNEGADGVGNASGNWHCDSTWLGDRVITTSTRTWALPTYNNHLYKQISSASTGASNDNHYFGYSTPWGYFDFNRFHCHFSPRDWQRLINNNWGFRPKRLNFKLFNIQVKEVTTNDGVTTIANNLTSTVQVFSDSEYQLPYVLGSAHQGCLPPFPADVFMIPQYGYLTLNNGSQAVGRSSFYCLEYFPSQMLRTGNNFTFSYTFEEVPFHSSYAHSQSLDRLMNPLIDQYLYYLNRTQNQSGSAQNKDLLFSRGSPAGMSVQPKNWLPGPCYRQQRVSKTKTDNNNSNFTWTGASKYNLNGRESIINPGTAMASHKDDEDKFFPMSGVMIFGKESAGASNTALDNVMITDEEEIKATNPVATERFGTVAVNFQSSSTDPATGDVHAMGALPGMVWQDRDVYLQGPIWAKIPHTDGHFHPSPLMGGFGLKNPPPQILIKNTPVPANPPAEFSATKFASFITQYSTGQVSVEIEWELQKENSKRWNPEVQYTSNYAKSANVDFTVDNNGLYTEPRPIGTRYLTRPL

SEQ ID NO: 280 - DNA, 2208 bp, Artificial Sequence
  source: /note="Description of Artificial Sequence: Synthetic polynucleotide"
atggctgccgatggctatcttccagattggctcgaggacactctctctgaaggaataagacagtggtggaagctcaaacctggcccaccaccaccaaagcccgcagagcggcatagggacgacagcaggggtcttgtgcttcctgggtacaagtacctcggacccttcaacggactcgacaagggagagccggtcaacgaggcagacgccgcggccctcgagcacgacaaagcctacgaccggcagctcgacagcggagacaacccgtacctcaagtacaaccacgccgacgcggagtttcaggagcgccttaaagaagatacgtcttttgggggcaacctcggacgagcagtcttccaggcgaaaaagagggttcttgaacctctgggcctggttgaggaacctgttaagacggctccgggaaaaaagaggccggtagagcactctcctgtggagccagactcctcctcgggaaccggaaaggcgggccagcagcctgcaagaaaaagattgaattttggtcagactggagacgcagactcagtacctgacccccagcctctcggacagccaccagcagccccctctggtctgggaactaatacgatggctacaggcagtggcgcaccaatggcagacaataacgagggcgccgacggagtgggtaattcctcgggaaattggcattgcgattccacatggatgggcgacagagtcatcaccaccagcacccgaacctgggccctgcccacctacaacaaccacctctacaaacaaatttccagccaatcaggagcctcgaacgacaatcactactttggctacagcaccccttgggggtattttgacttcaacagattccactgccacttttcaccacgtgactggcaaagactcatcaacaacaactggggattccgacccaagagactcaacttcaagctctttaacattcaagtcaaagaggtcacgcagaatgacggtacgacgacgattgccaataaccttaccagcacggttcaggtgtttactgactcggggtaccagctcccgtacgtcctcggctcggcgcatcaaggatgcctcccgccgttcccagcagacgtcttcatggtgccacagtatggataccccaccctgaacaacgggagtcaggcagtaggacgctcttcattttactgcctggagtactttccttctcagatgctgcgtaccggaaacaactttaccttcagctacacttttgaggacgttcctttccacagcagctacgctcacagccagagtctggaccgtctcatgaatcctctcatcgaccagtacctgtattacttgagcacaacaaacactccaagtggaaccaccacgcagtcaaggcttcagttttctcaggccggagcgagtgacattcgggaccagtctaggaactggcttcctggaccctgttaccgccagcagcgagtatcaaagacatctgcggataacaacaacagtgaatactcgtggactggagctaccaagtaccacctcaatggcagagactctctggtgaatccgggcccggccgtggcaagccacaaggacgatgaagaaaagttttttcctcagagcggggttctcatctttgggaagcaaggctcagagaaaacaaatgtggacattgaaaaggtcatgattacagacgaagaggaaatcaggacaaccaatcccgtggctacggagcagtatggttctgtatctaccaacctccagagaggcaacagacaagcagctaccgcagatgtcaacacacaaggcgttcttccaggcatggtctggcaggacagagatgtgtaccttcaggggcccatctgggcaaagattccacacacggacggacattttcacccctctcccctcatgggtggattcggacttaaacaccctcctccacagattctcatcaagaacaccccggtacctgcgaatccttcgaccaccttcagtgcggcaaagtttgcttccttcatcacacagtactccacgggacaggtcagcgtggagatcgagtgggagctgcagaaggaaaacagcaaacgctggaatcccgaaattcagtacacttccaactacaacaagtctgttaatgtggactttactgtggacactaatggcgtgtattcagagcctcgccccattggcaccagatacctgactcgtaatctgtaa

SEQ ID NO: 281 - protein, 735 aa, Artificial Sequence
  source: /note="Description of Artificial Sequence: Synthetic polypeptide"
MAADGYLPDWLEDTLSEGIRQWWKLKPGPPPPKPAERHRDDSRGLVLPGYKYLGPFNGLDKGEPVNEADAAALEHDKAYDRQLDSGDNPYLKYNHADAEFQERLKEDTSFGGNLGRAVFQAKKRVLEPLGLVEEPVKTAPGKKRPVEHSPVEPDSSSGTGKAGQQPARKRLNFGQTGDADSVPDPQPLGQPPAAPSGLGTNTMATGSGAPMADNNEGADGVGNSSGNWHCDSTWMGDRVITTSTRTWALPTYNNHLYKQISSQSGASNDNHYFGYSTPWGYFDFNRFHCHFSPRDWQRLINNNWGFRPKRLNFKLFNIQVKEVTQNDGTTTIANNLTSTVQVFTDSGYQLPYVLGSAHQGCLPPFPADVFMVPQYGYPTLNNGSQAVGRSSFYCLEYFPSQMLRTGNNFTFSYTFEDVPFHSSYAHSQSLDRLMNPLIDQYLYYLSTTNTPSGTTTQSRLQFSQAGASDIRDQSRNWLPGPCYRQQRVSKTSADNNNSEYSWTGATKYHLNGRDSLVNPGPAVASHKDDEEKFFPQSGVLIFGKQGSEKTNVDIEKVMITDEEEIRTTNPVATEQYGSVSTNLQRGNRQAATADVNTQGVLPGMVWQDRDVYLQGPIWAKIPHTDGHFHPSPLMGGFGLKHPPPQILIKNTPVPANPSTTFSAAKFASFITQYSTGQVSVEIEWELQKENSKRWNPEIQYTSNYNKSVNVDFTVDTNGVYSEPRPIGTRYLTRNL

SEQ ID NO: 282 - DNA, 2211 bp, Artificial Sequence
  source: /note="Description of Artificial Sequence: Synthetic polynucleotide"
atggctgccgacggttatcttccagattggctcgaggacactctctctgaaggaataagacagtggtggaagctcaaacctggcccaccaccaccaaagcccgcagagcggcataaggacgacagcaggggtcttgtgcttcctgggtacaagtacctcggacccttcaacggactcgacaagggagagccggtcaacgaggcagacgccgcggccctcgagcacgacaaagcctacgaccggcagctcgacagcggagacaacccgtacctcaagtacaaccacgccgacgcggagtttcaggagcgccttaaagaagatacgtcttttgggggcaacctcgggcgggcagtcttccaggccaagaagcgggttctcgaacctctcggtctggttgaggaaggcgctaagacggctcctggaaagaaacgtccggtagagcagtcgccacaagagccagactccccctcgggcatcggcaagacaggccagcagcccgctaaaaagagactcaattttggtcagactggcgactcagagtcagtccccgatccacaacctctcggagaacctccagcaacccccgctgctgtgggacctactacaatggcttcaggcggtggcgcaccaatggcagacaataacgaaggcgccgacggagtgggtaatgcctcaggaaattggcactgcgattccacatggctgggcgacagagtcatcaccaccagcacccgcacctgggccttgcccacctacaataaccacctctacaagcaaatctccagtgcttcaacgggggccagcaacgacaaccactacttcggctacagcaccccctgggggtattttgatttcaacagattccactgccacttttcaccacgtgactggcagcgactcatcaacaacaattggggattccggcccaagagactcaacttcaaactcttcaacatccaagtcaaggaggtcacgacgaatgatggcgtcacaaccatcgctaataaccttaccagcacggttcaagtcttctcggactcggagtaccagcttccgtacgtcctcggctctgcgcaccagggccgcctccctccgttcccggcggacgtgttcatgattccgcaatacggctacctgacgctcaacaatggcagccaagccgtgggacgttcatcctcttactgcctggaatatttcccttctcagatgctgagaacgggcaacaactttaccttcagctacacctttgaggaagtgcctctccacagcagctgcgcgcacagccagagcctggaccggctgatgaatcctctcatcgaccaatacctgtattacctgaacagaactcaaaatcagtccggaagtgcccaaaacagggacttgctgttcagccgtgggtctccagctggcatgtctgttcagcccaaaaactggctacctggaccctgttatcggcagcagcgcgtttctaaaacaaaaacagacaacaacaacagcaattttacctggactggtgcttcaaaatataacctcaatgggcgtgaatccatcatcaaccctggcactgctatggcctcacacaaagacgacgaagacaagttctttcccatgagcggtgtcatgatttttggaaaagagagcgccggagcttcaaacactgcattggacaatgtcatgattacagacgaagaggaaattaaagccactaaccctgtggccaccgaaagatttgggaccgtggcagtcaatttccagagcagcagcacagaccctgcgaccggagatgtgcatgctatgggagcattacctggcatggtgtggcaagatagagacgtgtacctgcagggtcccatttgggccaaaattcctcacacagatggacactttcacccgtctcctcttatgggcggctttggactcaagaacccgcctcctcagatcctcatcaaaaacacgcctgttcctgcgaatcctccggcggagttttcagctacaaagtttgcttcattcatcacccaatactccgcaggacaagtgagtgtggaaattgaatgggagctgcagaaagaaaacagcaagcgctggaatcccgaagtgcagtacacatccaattatgcaaaatctgccaacgttgattttactgtggacaacaatggactttatactgagcctcgccccattggcacccgttaccttacccgtcccctgtaa

SEQ ID NO: 283 - protein, 736 aa, Artificial Sequence
  source: /note="Description of Artificial Sequence: Synthetic polypeptide"
MAADGYLPDWLEDTLSEGIRQWWKLKPGPPPPKPAERHKDDSRGLVLPGYKYLGPFNGLDKGEPVNEADAAALEHDKAYDRQLDSGDNPYLKYNHADAEFQERLKEDTSFGGNLGRAVFQAKKRVLEPLGLVEEGAKTAPGKKRPVEQSPQEPDSPSGIGKTGQQPAKKRLNFGQTGDSESVPDPQPLGEPPATPAAVGPTTMASGGGAPMADNNEGADGVGNASGNWHCDSTWLGDRVITTSTRTWALPTYNNHLYKQISSASTGASNDNHYFGYSTPWGYFDFNRFHCHFSPRDWQRLINNNWGFRPKRLNFKLFNIQVKEVTTNDGVTTIANNLTSTVQVFSDSEYQLPYVLGSAHQGRLPPFPADVFMIPQYGYLTLNNGSQAVGRSSSYCLEYFPSQMLRTGNNFTFSYTFEEVPLHSSCAHSQSLDRLMNPLIDQYLYYLNRTQNQSGSAQNRDLLFSRGSPAGMSVQPKNWLPGPCYRQQRVSKTKTDNNNSNFTWTGASKYNLNGRESIINPGTAMASHKDDEDKFFPMSGVMIFGKESAGASNTALDNVMITDEEEIKATNPVATERFGTVAVNFQSSSTDPATGDVHAMGALPGMVWQDRDVYLQGPIWAKIPHTDGHFHPSPLMGGFGLKNPPPQILIKNTPVPANPPAEFSATKFASFITQYSAGQVSVEIEWELQKENSKRWNPEVQYTSNYAKSANVDFTVDNNGLYTEPRPIGTRYLTRPL

SEQ ID NO: 284 - protein, 736 aa, Artificial Sequence
  source: /note="Description of Artificial Sequence: Synthetic polypeptide"
MAADGYLPDWLEDTLSEGIRQWWKLKPGPPPPKPAERHKDDSRGLVLPGYKYLGPFNGLDKGEPVNEADAAALEHDKAYDRQLDSGDNPYLKYNHADAEFQERLKEDTSFGGNLGRAVFQAKKRVLEPLGLVEEGAKTAPGKKRPVEQSPQEPDSSSGIGKTGQQPAKKRLNFGQTGDSESVPDPQPLGEPPATPAAVGPTTMASGGGAPMADNNEGADGVGNASGNWHCDSTWLGDRVITTSTRTWALPTYNNHLYKQISSASTGASNDNHYFGYSTPWGYFDFNRFHCHFSPRDWQRLINNNWGFRPKRLNFKLFNIQVKEVTTNDGVTTIANNLTSTVQVFSDSEYQLPYVLGSAHQGCLPPFPADVFMIPQYGYLTLNNGSQAVGRSSFYCLEYFPSQMLRTGNNFTFSYTFEEVPLHSSCAHSQSLDRLMNPLIDQYLYYLNRTQNQSGSAQNRDLLFSRGSPAGMSVQPKNWLPGPCYRQQRVSKTKTDNNNSNFTWTGASKYNLNGRESIINPGTAMASHKDDEDKFFPMSGVMIFGKESAGASNTALDNVMITDEEEIKATNPVATERFGTVAVNFQSSSTDPATGDVHAMGALPGMVWQDRDVYLQGPIWAKIPHTDGHFHPSPLMGGFGLKNPPPQILIKNTPVPANPPAEFSATKFASFITQYSTGQVSVEIEWELQKENSKRWNPEVQYTSNYAKSANVDFTVDNNGLYTEPRPIGTRYLTRPL

SEQ ID NO: 285 - DNA, 2208 bp, Artificial Sequence
  source: /note="Description of Artificial Sequence: Synthetic polynucleotide"
atggctgccgatggctatcttccagattggctcgaggacactctctctgaaggaataagacagtggtggaagctcaaacctggcccaccaccaccaaagcccgcagagcggcatagggacgacagcaggggtcttgtgcttcctgggtacaagtacctcggacccttcaacggactcgacaagggagagccggtcaacgaggcagacgccgcggccctcgagcacgacaaagcctacgaccggcagctcgacagcggagacaacccgtacctcaagtacaaccacgccgacgcggagtttcaggagcgccttaaagaagatacgtcttttgggggcaacctcggacgagcagtcttccaggcgaaaaagagggttcttgaacctctgggcctggttggggaacctgttaagacggctccgggaaaaaagaggccggtagagcactctcctgtggagccagactcctcctcgggaaccggaaaggcgggccagcagcctgcaagaaaaagattgaattttggtcagactggagacgcagactcagtacctgacccccagcctctcggacagccaccagcagccccctctggtctgggaactaatacgatggctacaggcagtggcgcaccaatggcagacaataacgagggcgccgacggagtgggtaattcctcgggaaattggcattgcgattccacatggatgggcgacagagtcatcaccaccagcacccgaacctgggccctgcccacctacaacaaccacctctacaaacaaatttccagccaatcaggagcctcgaacgacagtcactactttggctacagcaccccttgggggtattttgacttcaacagattccactgccacttttcaccacgtgactggcaaagactcatcaacaacaactggggattccgacccaagagactcaacttcaagctctttaacattcaagtcaaagaggtcacgcagaatgacggtacgacgacgattgccaataaccttaccagcacggttcaggtgtttactgactcggagtaccagctcccgtacgtcctcggctcggcgcatcaaggatgcctcccgccgttcccagcagacgtcttcatggtgccacagtatggatacctcaccctgaacaacgggagtcaggcagtaggacgctcttcattttactgcctggagtactttccttctcagatgctgcgtaccggaaacaactttaccttcagctacacttttgaggacgttcctttccacagcagctacgctcacagccagagtctggaccgtctcatgaatcctctcatcgaccagtacctgtattacttgagcacaacaaacactccaagtggaaccaccacgcagtcaaggctccagttttctcaggccggagcgagtgacattcgggaccagtctaggaactggcttcctggaccctgttaccgccagcagcgagtatcaaagacatctgcggataacaacaacagtgaatactcgtggactggagctaccaagtaccacctcaatggcagagactctctggtgaatccgggcccggccatggcaagccacaaggacaatgaagaaaagttttttcctcagagcggggttctcatctttgggaagcaaggctcagagaaaacaaatgtggacattgaaaaggtcatgattacagacgaagaggaaatcaggacaaccaatcccgtggctacggagcagtatggttctgtatctaccaacctccagagaggcaacagacaagcagctaccgcagatgtcaacacacaaggcgttcttccaggcatggtctggcaggacagagatgtgtaccttcaggggcccatctgggcaaagattccacacacggacggacattttcacccctctcccctcatgggtggattcggacttaaacaccctcctccacagattctcatcaagaacaccccggtacctgcgaatccttcgaccaccttcagtgcggcaaagtttgcttccttcatcacacagtactccacgggacaggtcagcgtggagatcgagtgggagctgcagaaggaaaacagcaaacgctggaatcccgaaattcagtacacttccaactacaacaagtctgttaatgtggactttactgtggacactaatggcgtgtattcagagcctcgccccattggcaccagatacctgactcgtaatctgtaa

SEQ ID NO: 286 - protein, 735 aa, Artificial Sequence
  source: /note="Description of Artificial Sequence: Synthetic polypeptide"
MAADGYLPDWLEDTLSEGIRQWWKLKPGPPPPKPAERHRDDSRGLVLPGYKYLGPFNGLDKGEPVNEADAAALEHDKAYDRQLDSGDNPYLKYNHADAEFQERLKEDTSFGGNLGRAVFQAKKRVLEPLGLVGEPVKTAPGKKRPVEHSPVEPDSSSGTGKAGQQPARKRLNFGQTGDADSVPDPQPLGQPPAAPSGLGTNTMATGSGAPMADNNEGADGVGNSSGNWHCDSTWMGDRVITTSTRTWALPTYNNHLYKQISSQSGASNDSHYFGYSTPWGYFDFNRFHCHFSPRDWQRLINNNWGFRPKRLNFKLFNIQVKEVTQNDGTTTIANNLTSTVQVFTDSEYQLPYVLGSAHQGCLPPFPADVFMVPQYGYLTLNNGSQAVGRSSFYCLEYFPSQMLRTGNNFTFSYTFEDVPFHSSYAHSQSLDRLMNPLIDQYLYYLSTTNTPSGTTTQSRLQFSQAGASDIRDQSRNWLPGPCYRQQRVSKTSADNNNSEYSWTGATKYHLNGRDSLVNPGPAMASHKDNEEKFFPQSGVLIFGKQGSEKTNVDIEKVMITDEEEIRTTNPVATEQYGSVSTNLQRGNRQAATADVNTQGVLPGMVWQDRDVYLQGPIWAKIPHTDGHFHPSPLMGGFGLKHPPPQILIKNTPVPANPSTTFSAAKFASFITQYSTGQVSVEIEWELQKENSKRWNPEIQYTSNYNKSVNVDFTVDTNGVYSEPRPIGTRYLTRNL

SEQ ID NO: 287 - protein, 737 aa, Artificial Sequence
  source: /note="Description of Artificial Sequence: Synthetic polypeptide"
RMAADGYLPDWLEDNLSEGIREWWDLKPGAPKPKANQQKQDDGRGLVLPGYKYLGPFNGLDKGEPVNAADAAALEHDKAYDQQLKAGDNPYLRYNHADAEFQERLQEDTSFGGNLGRAVFQAKKRVLEPLGLVEEGAKTAPGKKRPVEQSPQEPDSSSGIGKTGQQPAKKRLNFGQTGDSESVPDPQPLGEPPATPAAVGPTTMASGGGAPMADNNEGADGVGNASGNWHCDSTWLGDRVITTSTRTWALPTYNNHLYKQISSTSTGASNDNHYFGYGTPWGYFDFNRFHCHFSPRDWQRLINNNWGFRPKRLNFKLFNIQVEEVTTNDGVTTIANNLTSTVQVFSDSEYQLPYVLGSAHQGCLPPFPADVFMIPQYGYLTLNNGSQAVGRSSFYCLEYFPSQMLRTGNNFTFSYTFEEVPFHSSYAHSQSLDRLMNPLIDQYLYYLNRTQNQSGSAQNKDLLFSRGSPAGMSVQPKNWLPGPCYRQQRVSKTKTDNNNSNFTWTGASKYNLNGRESIINPGTAVASHKDDEDKFFPMSGVMIFGKESAGASSTALDNVMITDEEEIKATNPVATERFGTVAVNFQSSSTDPATGDVHAMGALPGMVWQDRDVYLQGPIWAKIPHTDGHFHPSPLMGGFGLKNPPPQILIKNTPVPANPPAEFSATKFASFITQYSTGQVSVEIEWELQKENSKRWNPEVQYTSNYAKSANVDFTVDNNGLYTEPRPIGTRYLTRPL

SEQ ID NO: 288 - protein, 736 aa, Artificial Sequence
  source: /note="Description of Artificial Sequence: Synthetic polypeptide"
MAADGYLPDWLEDNLSEGIREWWDLKPGAPKPKANQQKQDDGRGLVLPGYKYLGPFNGLDKGEPVNAADAAALEHDKAYDQQLKAGDNPYLRYNHADAEFQERLQEDTSFGGNLGRAVFQAKKRVLEPLGLVEEGAKTAPGKKRPVEQSPQEPDSSSGIGKTGQQPAKKRLNFGQTGDSESVPDPQPLGEPPATPAAVGPTTMASGGGAPMADNNEGADGVGNASGNWHCDSTWLGDRVITTSTRTWALPTYNNHLYKQISSTSTGASNDNHYFGYGTPWGYFDFNRFHCHFSPRDWQRLINNNWGFRPKRLNFKLFNIQVEEVTTNDGVTTIANNLTSTVQVFSDSEYQLPYVLGSAHQGCLPPFPADVFMIPQYGYLTLNNGSQAVGRSSFYCLEYFPSQMLRTGNNFTFSYTFEEVPFHSSYAHSQSLDRLMNPLIDQYLYYLNRTQNQSGSAQNKDLLFSRGSPAGMSVQPKNWLPGPCYRQQRVSKTKTDNNNSNFTWTGASKYNLNGRESIINPGTAVASHKDDEDKFFPMSGVMIFGKESAGASSTALDNVMITDEEEIKATNPVATERFGTVAVNFQSSSTDPATGDVHAMGALPGMVWQDRDVYLQGPIWAKIPHTDGHFHPSPLMGGFGLKNPPPQILIKNTPVPANPPAEFSATKFASFITQYSTGQVSVEIEWELQKENSKRWNPEVQYTSNYAKSANVDFTVDNNGLYTEPRPIGTRYLTRPL

SEQ ID NO: 289 - DNA, 2211 bp, Artificial Sequence
  source: /note="Description of Artificial Sequence: Synthetic polynucleotide"
atggctgccgatggttatcttccagattggctcgaggacaacctctctgagggcattcgcgagtggtgggacttgaaacctggagccccgaagcccaaagccaaccagcaaaagcaggacgacggccggggtctggtgcttcctggctacaagtacctcggacccttcaacggactcgacaagggggagcccgtcaacgcggcggacgcagcggccctcgagcacgacaaggcctacgaccagcagctcaaagcgggtgacaatccgtacctgcggtataaccacgccgacgccgagtttcaggagcgtctgcaagaagatacgtcttttgggggcaacctcgggcgagcagtcttccaggccaagaagcgggttctcgaacctctcggtctggttgaggaaggcgctaagacggctcctggaaagaaacgtccggtagagcagtcgccacaagagccagactcctcctcgggcatcggcaagacaggccagcagcccgctaaaaagagactcaattttggccagactggcgactcagagtcagtccccgatccacaacctctcggagaacctccagcaacccccgctgctgtgggacctactacaatggcttcaggcggtggcgcaccaatggcagacaataacgaaggcgccgacggagtgggtaatgcctcaggaaattggcattgcgattccacatggctgggcgacagagtcatcaccaccagcacccgcacctgggccttgcccacctacaataaccacctctacaagcaaatctccagtacttcaacgggggccagcaacgacaaccactacttcggctacggcaccccctgggggtattttgatttcaacagattccactgccacttttcaccacgtgactggcagcgactcatcaacaacaattggggattccggcccaagagactcaacttcaaactcttcaacatccaagtcgaggaggtcacgacgaatgatggcgtcacaaccatcgctaataaccttaccagcacggttcaagtcttctcggactcggagtaccagcttccgtacgtcctcggctctgcgcaccagggctgcctccctccgttcccggcggacgtgttcatgattccgcaatacggctacctgacgctcaacaatggcagccaagccgtgggacgttcatccttttactgcctggaatatttcccttctcagatgctgagaacgggcaacaactttaccttcagctacacctttgaggaagtgcctttccacagcagctacgcgcacagccagagcctggaccggctgatgaatcctctcatcgaccaatacctgtattacctgaacagaacacaaaatcagtccggaagtgcccaaaacaaggacttgctgtttagccgtgggtctccagctggcatgtctgttcagcccaaaaactggctacctggaccctgttatcggcagcagcgcgtttctaaaacaaaaacagacaacaacaacagcaattttacctggactggtgcttcaaaatataacctcaatgggcgtgaatccatcatcaaccctggcaccgctgtggcctcacacaaagacgacgaagacaagttctttcccatgagcggtgtcatgatttttggaaaagagagcgccggagcttcaagcactgcattggacaatgtcatgattacagacgaagaggaaattaaagccactaaccctgtggccaccgaaagatttgggaccgtggcagtcaatttccagagcagcagcacagaccctgcgaccggagatgtgcatgctatgggagcattacctggcatggtgtggcaagatagagacgtgtacctgcagggtcccatttgggccaaaattcctcacacagatggacactttcacccgtctcctcttatgggcggctttggactcaagaacccgcctcctcagatcctcatcaaaaacacgcctgttcctgcgaatcctccggcggagttttcagctacaaagtttgcttcattcatcacccaatactccacaggacaagtgagtgtggaaattgaatgggagctgcagaaagaaaacagcaagcgctggaatcccgaagtgcagtacacatccaattatgcaaaatctgccaacgttgattttactgtggacaacaatggactttatactgagcctcgccccattggcacccgttaccttacccgtcccctgtaa

SEQ ID NO: 290 - protein, 737 aa, Artificial Sequence
  source: /note="Description of Artificial Sequence: Synthetic polypeptide"
RMAADGYLPDWLEDNLSEGIREWWDLKPGAPKPKANQQKQDDGRGLVLPGYKYLGPFNGLDKGEPVNAADAAALEHDKAYDQQLKAGDNPYLRYNHADAEFQERLQEDTSFGGNLGRAVFQAKKRVLEPLGLVEEGAKTAPGKKRPVEQSPQEPDSSSGIGKTGQQPAKKRLNFGQTGDSESVPDPQPLGEPPATPAAVGPTTMASGGGAPMADNNEGADGVGNASGNWHCDSTWLGDRVITTSTRTWALPTYNNHLYKQISSTSTGASNDNHYFGYSTPWGYFDFNRFHCHFSPRDWQRLINNNWGFRPKRLNFKLFNIQVEEVTTNDGVTTIANNLTSTVQVFSDSEYQLPYVLGSAHQGCLPPFPADVFMIPQYGYLTLNNGSQAVGRSSFYCLEYFPSQMLRTGNNFTFSYTFEEVPFHSSYAHSQSLDRLMNPLIDQYLYYLNRTQNQSGSAQNKDLLFSRGSPAGMSVQPKNWLPGPCYRQQRVSKTKTDNNNSNFTWTGASKYNLNGRESIINPGTAVASHKDDEDKFFPMSGVMIFGKESAGASSTALDNVMITDEEEIKATNPVATERFGTVAVNFQSSSTDPATGDVHAMGALPGMVWQDRDVYLQGPIWAKIPHTDGHFHPSPLMGGFGLKNPPPQILIKNTPVPANPPAEFSATKFASFITQYSTGQVSVEIEWELQKENSKRWNPEVQYTSNYAKSANVDFTVDNNGLYTEPRPIGTRYLTRPL

SEQ ID NO: 291 - protein, 737 aa, Artificial Sequence
  source: /note="Description of Artificial Sequence: Synthetic polypeptide"
RMAADGYLPDWLEDNLSEGIREWWDLKPGAPKPKANQQKQDDGRGLVLPGYKYLGPFNGLDKGEPVNAADAAALEHDKAYDQQLKAGDNPYLRYNHADAEFQERLQEDTSFGGNLGRAVFQAKKRVLEPLGLVEEGAKTAPGKKRPVEQSPQEPDSSSGIGKTGQQPAKKRLNFGQTGDSESVPDPQPLGEPPATPAAVGPTTMASGGGAPMADNNEGADGVGNASGNWHCDSTWLGDRVITTSTRTWALPTYNNHLYKQISSTSTGASNDNHYFGYSTPWGYFDFNRFHCHFSPRDWQRLINNNWGFRPKRLNFKLFNIQVKEVTTNDGVTTIANNLTSTVQVFSDSEYQLPYVLGSAHQGCLPPFPADVFMIPQYGYLTLNNGSQAVGRSSFYCLEYFPSQMLRTGNNFTFSYTFEEVPFHSSYAHSQSLDRLMNPLIDQYLYYLNRTQNQSGSAQNKDLLFSRGSPAGMSVQPKNWLPGPCYRQQRVSKTKTDNNNSNFTWTGASKYNLNGRESIINPGTAVASHKDDEDKFFPMSGVMIFGKESAGASSTALDNVMITDEEEIKATNPVATERFGTVAVNFQSSSTDPATGDVHAMGALPGMVWQDRDVYLQGPIWAKIPHTDGHFHPSPLMGGFGLKNPPPQILIKNTPVPANPPAEFSATKFASFITQYSTGQVSVEIEWELQKENSKRWNPEVQYTSNYAKSANVDFTVDNNGLYTEPRPIGTRYLTRPL

SEQ ID NO: 292 - protein, 737 aa, Artificial Sequence
  source: /note="Description of Artificial Sequence: Synthetic polypeptide"
RMAADGYLPDWLEDNLSEGIREWWDLKPGAPKPKANQQKQDDGRGLVLPGYKYLGPFNGLDKGEPVNAADAAALEHDKAYDQQLKAGDNPYLRYNHADAEFQERLQEDTSFGGNLGRAVFQAKKRVLEPLGLVEEGAKTAPGKKRPVEQSPQEPDSSSGIGKTGQQPAKKRLNFGQTGDSESVPDPQPLGEPPATPAAVGPTTMASGGGAPMADNNEGADGVGNASGNWHCDSTWLGDRVITTSTRTWALPTYNNHLYKQISSTSTGASNDNHYFGYSTPWGYFDFNRFHCHFSPRDWQRLINNNWGFRPKRLNFKLFNIQVKEVTTNDGVTTIANNLTSTVQVFSDSEYQLPYVLGSAHQGCLPPFPADVFMIPQYGYLTLNNGSQAVGRSSFYCLEYFPSQMLRTGNNFTFSYTFEEVPFHSSYAHSQSLDRLMNPLIDQYLYYLNRTQNQSGSAQNKDLLFSRGSPAGMSVQPKNWLPGPCYRQQRVSKTKTDNNNSNFTWTGASKYNLNGRESIINPGTAVASHKDDEDKFFPMSGVMIFGKESAGANSTALDNVMITDEEEIKATNPVATERFGTVAVNFQSSSTDPATGDVHAMGALPGMVWQDRDVYLQGPIWAKIPHTDGHFHPSPLMGGFGLKNPPPQILIKNTPVPANPPAEFSATKFASFITQYSTGQVSVEIEWELQKENSKRWNPEVQYTSNYAKSANVDFTVDNNGLYTEPRPIGTRYLTRPL

SEQ ID NO: 293 - DNA, 2208 bp, Artificial Sequence
  source: /note="Description of Artificial Sequence: Synthetic polynucleotide"
atggctgccgatggttatcttccagattggctcaaggacactctctctgaaggaataagacagtggtggaagctcaaacctggcccaccaccaccaaagcccgcagagcggcataaggacgacagcgggggtcttgtgcttcctgggtacaagtacctcggacccttcaacggactcgacaagggagagccggtcaacgaggcagacgccgcggccctcgagtacgacaaggcctacgaccggcagctcgacagcggagacaacccgtacctcaagtacaaccacgccgacgcggagtttcaggagcgccttaaagaagatacgtcttttgggggcaacctcggacgagcagtcttccaggcgaaaaagagggttcttgaacctctgggcctggttgaggaacctgttaagacggctccgggaaaaaagaggccggtagagcactctcctgtggagccagactcctcctcgggaacaggaaaagcgggccagcagcctgcgagaaagagattgaattttggtcagactggagacgcagactccgtacctgacccccagcctctcggacagccaccagcagccccctctggtctgggaactaatacgatggctacaggcagtggcgcaccaatggcagacaataacgagggcgccgacggagtgggtaattcctcgggaagttggcattgcgattccacatggatgggcgacagagtcatcaccaccagcacccgaacctgggctctgcccacctacaacaaccatctgtacaagcagatctccagccaatcaggagccagcaacgacaaccactactttggctacagcaccccttgggggtattttgacttcaacagattccactgccacttttcaccacgtgactggcaaagactcatcaacaacaactggggattccggcccaagagactcaacttcaagctctttaacattcaagtcaaggaggtcacgcagaatgacggtacgacgacgattgccaataaccttaccagcacggttcaggtgtttactgactcggagtaccagctcccgtacgtccccggctcggcgcatcaaggatgcctcccgccgttcccagcagacgtcttcatggtgccacagtatggatacctcaccctgaacaacgggagtcaggcagtaggacgctcttcattttactgcctggagtactttccttctcagatgcttcgtaccggaaacaactttaccttcagctacacctttgaggatgttcctttccacagcagctacgctcacagccagagtttggaccgtctcatgaatcctctcatcgaccagtacctgtattacttgagcagaacaaacactccaagcggaaccaccacgcagtccaggcttcagttttctcaggccggagcaagtgacattcgggaccagtctaggaactggcttcctggaccctgttaccgccagcagcgagtatcaaagacagctgcggacaacaacaacagtgaatactcgtggactggagctaccaagtaccacctcaatggcagagactctctggtgaatccgggcccggccatggccagccacaaggacgatgaagaaaagttttttcctcaaagcggggttctcatctttgggaagcaaggctcagagaaaacaaatgtggacattgaaaaggtcatgattacagacgaagaggaaatcagaaccaccaatcccgtggccacggagcagtatggttctgtatctaccaacctccagagcggcaacacacaagcagctactgcagatgtcaacacacaaggcgttcttccaggcatggtctggcaggacagagacgtgcacctgcaggggcctatctgggcaaagattccacacacggacggacattttcacccctctcccctcatgggcggatttggacttaaacaccctcctccacagattctcatcaagaacaccccggtacctgcaaatccttcgaccaccttcagtgcggcaaagtttgcttccttcatcacacagtattccacagggcaggtcagcgtggagatcgagtgggagctgcagaaggagaacagcaaacgctggaaccccgagatccagtacacttccaactacaacaaatctgttaatgtggactttactgtggacactaatggtgtgtattcagagcctcgccccattggcaccagatacctgactcgtaatctgtaa

SEQ ID NO: 294 - protein, 735 aa, Artificial Sequence
  source: /note="Description of Artificial Sequence: Synthetic polypeptide"
MAADGYLPDWLKDTLSEGIRQWWKLKPGPPPPKPAERHKDDSGGLVLPGYKYLGPFNGLDKGEPVNEADAAALEYDKAYDRQLDSGDNPYLKYNHADAEFQERLKEDTSFGGNLGRAVFQAKKRVLEPLGLVEEPVKTAPGKKRPVEHSPVEPDSSSGTGKAGQQPARKRLNFGQTGDADSVPDPQPLGQPPAAPSGLGTNTMATGSGAPMADNNEGADGVGNSSGSWHCDSTWMGDRVITTSTRTWALPTYNNHLYKQISSQSGASNDNHYFGYSTPWGYFDFNRFHCHFSPRDWQRLINNNWGFRPKRLNFKLFNIQVKEVTQNDGTTTIANNLTSTVQVFTDSEYQLPYVPGSAHQGCLPPFPADVFMVPQYGYLTLNNGSQAVGRSSFYCLEYFPSQMLRTGNNFTFSYTFEDVPFHSSYAHSQSLDRLMNPLIDQYLYYLSRTNTPSGTTTQSRLQFSQAGASDIRDQSRNWLPGPCYRQQRVSKTAADNNNSEYSWTGATKYHLNGRDSLVNPGPAMASHKDDEEKFFPQSGVLIFGKQGSEKTNVDIEKVMITDEEEIRTTNPVATEQYGSVSTNLQSGNTQAATADVNTQGVLPGMVWQDRDVHLQGPIWAKIPHTDGHFHPSPLMGGFGLKHPPPQILIKNTPVPANPSTTFSAAKFASFITQYSTGQVSVEIEWELQKENSKRWNPEIQYTSNYNKSVNVDFTVDTNGVYSEPRPIGTRYLTRNL

SEQ ID NO: 295 - DNA, 2208 bp, Artificial Sequence
  source: /note="Description of Artificial Sequence: Synthetic polynucleotide"
atggctgccgatggttatcttccagattggctcgaggacactctctctgaaggaataagacagtggtggaagctcaaacctggcccaccaccaccaaagcccgcagagcggcataaggacgacagcaggggtcttgtgcttcctgggtacaagtacctcggacccttcaacggactcgacaagggggagccggtcaacgaggcagacgccgcggccctcgagcacgacaaggcctacgaccggcagctcgacagcggagacaacccgtacctcaagtacaaccacgccgacgcagagtttcaggagcgccttaaagaagatacgtcttttgggggcaacctcggacgagcagtcttccaggcgaaaaagagggttcttgaacctctgggcctggttgaggaacctgttaagacggctccgggaaaaaagaggccggtagagcactctcctgtggagccagactcctcctcgggaaccggaaaagcgggccagcagcctgcaagaaaaagattaaattttggtcagactggagacgcagactccgtacctgacccccagcctctcggacagccaccagcagccccctctggtctgggatctactacaatggctacaggcagtggcgcaccaatggcagacaataacgagggtgccgatggagtgggtaattcctcaggaaattggcattgcgattcccaatggctgggcgacagagtcatcaccaccagcacccgaacctgggccctgcccacatacaacaaccacctctacaagcaaatctccagccaatcaggagccagcaacgacaaccactactttggctacagcaccccctgggggtattttgacttcaacagattccactgccacttttcaccacgtgactggcaaagactcatcaacaacaactggggattccggcccaaaagactcaacttcaagctctttaatattcaagtcaaagaggtcacgcagaatgacggtacgacgacgattgccaataaccttaccagcacggttcaggtgtttactgactcggagtaccagctcccgtacgtcctgggctcggcgcatcaaggatgcctcccgccgtttccagcggacgtcttcatggtcccacagtatggatacctcaccctgaacaacgggagtcaggcggtaggacgctcttccttttactgcctggagtactttccttctcagatgctgcgtactggaaacaactttcagttcagctacacttttgaagacgtgcctttccacagcagctacgctcacagccagagtctggatcggctgatgaatcctctgatcgaccagtacctgtattatctgaacaagacacaaacaaatagtggaactcttcagcagtctcggctactgtttagccaagctggaccaaccaacatgtctcttcaagctaaaaactggctgcctggaccttgctacagacagcagcgtctgtcaaaacaggcaaacgacaacaacaacagcaactttccctggactgcagctacaaagtatcatctaaatggccgggactcgttggttaatccaggaccagctatggccagtcgcaaggatgacgaagaaaagtttttccccatgcatggaaccctgatatttggtaaacaaggaacaaatgccaacgacgcggatttggaaaatgtcatgattacagatgaagaagaaatcagggccaccaatcccgtggctacggagcagtacgggactgtgtcaaataatttgcaaaactcaaacactggtccaactactggaactgtcaatcaccaaggagcgttacctggtatggtgtggcaggatcgagacgtgtacctgcagggacccatttgggccaagattcctcacaccgatggacactttcatccttctccactgatgggaggttttggactcaaacacccgcctcctcagatcatgatcaaaaacactcccgttccagccaatcctcccacaaacttcagttctgccaagtttgcttctttcatcacacagtattccacgggacaggtcagcgtggagatcgagtgggagctgcagaaggagaacagcaaacgctggaatcccgaaattcagtacacttccaactacaacaagtctgttaatgtggactttactgtggacactaatggtgtgtattcagagcctcgccccattggcaccagatacctgactcgtaatctgtaa

SEQ ID NO: 296 - protein, 735 aa, Artificial Sequence
  source: /note="Description of Artificial Sequence: Synthetic polypeptide"
MAADGYLPDWLEDTLSEGIRQWWKLKPGPPPPKPAERHKDDSRGLVLPGYKYLGPFNGLDKGEPVNEADAAALEHDKAYDRQLDSGDNPYLKYNHADAEFQERLKEDTSFGGNLGRAVFQAKKRVLEPLGLVEEPVKTAPGKKRPVEHSPVEPDSSSGTGKAGQQPARKRLNFGQTGDADSVPDPQPLGQPPAAPSGLGSTTMATGSGAPMADNNEGADGVGNSSGNWHCDSQWLGDRVITTSTRTWALPTYNNHLYKQISSQSGASNDNHYFGYSTPWGYFDFNRFHCHFSPRDWQRLINNNWGFRPKRLNFKLFNIQVKEVTQNDGTTTIANNLTSTVQVFTDSEYQLPYVLGSAHQGCLPPFPADVFMVPQYGYLTLNNGSQAVGRSSFYCLEYFPSQMLRTGNNFQFSYTFEDVPFHSSYAHSQSLDRLMNPLIDQYLYYLNKTQTNSGTLQQSRLLFSQAGPTNMSLQAKNWLPGPCYRQQRLSKQANDNNNSNFPWTAATKYHLNGRDSLVNPGPAMASRKDDEEKFFPMHGTLIFGKQGTNANDADLENVMITDEEEIRATNPVATEQYGTVSNNLQNSNTGPTTGTVNHQGALPGMVWQDRDVYLQGPIWAKIPHTDGHFHPSPLMGGFGLKHPPPQIMIKNTPVPANPPTNFSSAKFASFITQYSTGQVSVEIEWELQKENSKRWNPEIQYTSNYNKSVNVDFTVDTNGVYSEPRPIGTRYLTRNL

SEQ ID NO: 297 - DNA, 2208 bp, Artificial Sequence
  source: /note="Description of Artificial Sequence: Synthetic polynucleotide"
atggctgccgatggttatcttccagattggctcgaggacactctctctgaaggaataagacagtggtggaagctcaaacctggcccaccaccaccaaagcccgcagagcggcataaggacgacagcaggggtcttgtgcttcctgggtacaagtacctcggacccttcaacggactcgacaagggagagccggtcaacgaggcagacgccgcggccctcgagcacgacaaagcctacgaccggcagctcgacagcggagacaacccgtacctcaagtacaaccacgccgacgcggagtttcaggagcgccttaaagaagatacgtcttttgggggcaacctcggacgagcagtcttccaggcgaaaaagagggttcttgaacctctgggcctggttggggaacctgtcaagacggctccaggaaaaaagaggccggtagagcactctcctgtggagccagactcctcctcgggaaccggaaaggcgggccagcagcctgcaagaaaaagattgaattttggtcagactggagacgcagactcagtacctgacccccagcctctcggacagccaccagcagccccctctggtctgggaactaatacgatggctacaggcagtggcgcaccaatggcagacaataacgagggcgccgacggagtgggtaattcctcgggaaattggcattgcgattccacatggatgggcgacagagtcatcaccaccagcacccgaacctgggccctgcccacctacaacaaccacctctacaaacaaatttccagccaatcaggagcctcgaacgacaatcactactttggctacagcaccccttgggggtattttgacttcaacagattccactgccacttttcaccacgtgactggcaaagactcatcaacaacaactggggattccgacccaagagactcaacttcaagctctttaacattcaagtcaaagaggtcacgcagaatgacggtacgacgacgattgccaataaccttaccagcacggttcaggtgtttactgactcggagtaccagctcccgtacgtcctcggctcggcgcatcaaggatgcctcccgccgttcccagcagacgtcttcatggtgccacagtatggatacctcaccctgaacaacgggagtcaggcagtaggacgctcttcattttactgcctggagtactttccttctcagatgctgcgtaccggaaacaactttaccttcagctacacttttgaggacgttcctttccacagcggctacgctcacagccagagtctggaccgtctcatgaatcctctcatcgaccagtacctgtattacttgagcacaacaaacactccaagtggaaccaccacgcagtcaaggcttcagttttctcaggccggagcgagtgacattcgggaccagtctaggaactggcttcctggaccctgttaccgccagcagcgagtatcaaagacatctgcggataacaacaacagtgaatactcgtggactggagctaccaagtaccacctcaatggcagagactctctggtgaatccgggcccggccatggcaagccacaaggacaatgaagaaaagttttttcctcagagcggggttctcatctttgggaagcaaggctcagagaaaacaaatgtggacattgaaaaggtcatgattacagacgaagaggaaatcaggacaaccaatcccgtggctacggagcagtacggttctgtatctaccaacctccagagaggcaacagacaagcagctaccgcagatgtcaacacacaaggcgttcttccaggcatggtctggcaggacagagatgtgtaccttcaggggcccatctgggcaaagattccacacacggacggacattttcacccctctcccctcatgggtggattcggacttaaacaccctcctccacagattctcatcaagaacaccccggtacctgcgaatccttcgaccaccttcagtgcggcaaagtttgcttccttcatcacacagtactccacgggacaggtcagcgtggagatcgagtgggagctgcagaaggaaaacagcaaacgctggaatcccgaaattcagtacacttccaactacaacaagtctgttaatgtggactttactgtggacactaatggcgtgtattcagagcctcgccccattggcaccagatacctgactcgtaatctgtaa

SEQ ID NO: 298 - protein, 735 aa, Artificial Sequence
  source: /note="Description of Artificial Sequence: Synthetic polypeptide"
MAADGYLPDWLEDTLSEGIRQWWKLKPGPPPPKPAERHKDDSRGLVLPGYKYLGPFNGLDKGEPVNEADAAALEHDKAYDRQLDSGDNPYLKYNHADAEFQERLKEDTSFGGNLGRAVFQAKKRVLEPLGLVGEPVKTAPGKKRPVEHSPVEPDSSSGTGKAGQQPARKRLNFGQTGDADSVPDPQPLGQPPAAPSGLGTNTMATGSGAPMADNNEGADGVGNSSGNWHCDSTWMGDRVITTSTRTWALPTYNNHLYKQISSQSGASNDNHYFGYSTPWGYFDFNRFHCHFSPRDWQRLINNNWGFRPKRLNFKLFNIQVKEVTQNDGTTTIANNLTSTVQVFTDSEYQLPYVLGSAHQGCLPPFPADVFMVPQYGYLTLNNGSQAVGRSSFYCLEYFPSQMLRTGNNFTFSYTFEDVPFHSGYAHSQSLDRLMNPLIDQYLYYLSTTNTPSGTTTQSRLQFSQAGASDIRDQSRNWLPGPCYRQQRVSKTSADNNNSEYSWTGATKYHLNGRDSLVNPGPAMASHKDNEEKFFPQSGVLIFGKQGSEKTNVDIEKVMITDEEEIRTTNPVATEQYGSVSTNLQRGNRQAATADVNTQGVLPGMVWQDRDVYLQGPIWAKIPHTDGHFHPSPLMGGFGLKHPPPQILIKNTPVPANPSTTFSAAKFASFITQYSTGQVSVEIEWELQKENSKRWNPEIQYTSNYNKSVNVDFTVDTNGVYSEPRPIGTRYLTRNL

SEQ ID NO: 299 - DNA, 2208 bp, Artificial Sequence
  source: /note="Description of Artificial Sequence: Synthetic polynucleotide"
atggctgccgatggttatcttccagattggctcgaggacactctctctgaaggaataagacagtggtggaagctcaaacctggcccaccaccaccaaagcccgcagagcggcataaggacgacagcaggggtcttgtgcttcctgggtacaagtacctcggacccttcaacggactcgacaagggagagccggtcaacgaggcagacgccgcggccctcgagcacgacaaagcctacgaccggcagctcgacagcggagacaacccgtacctcaagtacaaccacgccgacgcggagtttcaggagcgccttaaagaagatacgtcttttgggggcaacctcggacgagcagtcttccaggcgaaaaagagggttcttgaacctctgggcctggttggggaacctgttaagacggctccgggaaaaaagaggccggtagagcactctcctgtggagccagactcctcctcgggaaccggaaaggcgggccagcagcctgcaagaaaaagattgaattttggtcagactggagacgcagactcagtacctgacccccagcctctcggacagccaccagcagccccctctggtctgggaactaatacgatggctacaggcagtggcgcaccaatggcagacaataacgagggcgccgacggagtgggtaattcctcgggaaatcggcattgcgattccacatggatgggcgacagagtcatcaccaccagcacccgaacctgggccctgcccacctacaacaaccacctctacagacaaatttccagccaatcaggagcctcgaacgacaatcactactttggctacagcaccccttgggggtattttgacttcaacagattccactgccacttttcaccacgtgactggcaaagactcatcaacaacaactggggattccgacccaagagactcaacttcaagctctttaacattcaagtcaaagaggtcacgcagaatgacggtacgacgacgattgccaataaccttaccagcacggttcaggtgtttactgactcggagtaccagctcccgtacgtcctcggctcggcgcatcaaggatgcctcccgccgttcccagcagacgtcttcatggtgccacagtatggatacctcaccctgagcaacgggagtcaggcagtaggacgctcttcattttactgcccggagtactttccttctcagatgctgcgtaccggaaacaactttaccttcagctacacttttgaggacgttcctttccacagcagctacgctcacagccagagtctggaccgtctcatgaatcctctcatcgaccagtacctgtattacttgagcacaacaaacactccaagtggaaccaccacgcagtcaaggcttcagttttctcaggccggagcgagtgacattcgggaccagtctaggaactggcttcctggaccctgttaccgccagcagcgagtatcaaagacatctgcggataacaacaacagtgaatactcgtggactggagctaccaagtaccacctcaatggcagagactctctggtgaatccgggcccggccatggcaagccacaaggacaatgaagaaaagttttttcctcagagcggggttctcatctttgggaagcaaggctcagagaaaacaaatgtggacattgaaaaggtcatgattacagacgaagaggaaatcaggacaaccaatcccgtggctacggagcagtatggttctgtatctaccaacctccagagaggcaacagacaagcagctaccgcagatgtcaacacacaaggcgttcttccaggcatggtctggcaggacagagatgtgtaccttcaggggcccatctgggcaaagattccacacacggacggacattttcacccctctcccctcatgggtggattcggacctaaacaccctcctccacagattctcatcaagaacaccccggtacctgcgaatccttcgaccaccttcagtgcggcaaagtttgcttccttcatcacacagtactccacgggacaggtcagcgtggagatcgagtgggagctgcagaaggaaaacagcaaacgctggaatcccgaaattcagtacacttccaactacaacaagtctgttaatgtggactttactgtggacactaatggcgtgtattcagagcctcgccccattggcaccagatacctgactcgtaatttgtaa

SEQ ID NO: 300 - protein, 735 aa, Artificial Sequence
  source: /note="Description of Artificial Sequence: Synthetic polypeptide"
MAADGYLPDWLEDTLSEGIRQWWKLKPGPPPPKPAERHKDDSRGLVLPGYKYLGPFNGLDKGEPVNEADAAALEHDKAYDRQLDSGDNPYLKYNHADAEFQERLKEDTSFGGNLGRAVFQAKKRVLEPLGLVGEPVKTAPGKKRPVEHSPVEPDSSSGTGKAGQQPARKRLNFGQTGDADSVPDPQPLGQPPAAPSGLGTNTMATGSGAPMADNNEGADGVGNSSGNRHCDSTWMGDRVITTSTRTWALPTYNNHLYRQISSQSGASNDNHYFGYSTPWGYFDFNRFHCHFSPRDWQRLINNNWGFRPKRLNFKLFNIQVKEVTQNDGTTTIANNLTSTVQVFTDSEYQLPYVLGSAHQGCLPPFPADVFMVPQYGYLTLSNGSQAVGRSSFYCPEYFPSQMLRTGNNFTFSYTFEDVPFHSSYAHSQSLDRLMNPLIDQYLYYLSTTNTPSGTTTQSRLQFSQAGASDIRDQSRNWLPGPCYRQQRVSKTSADNNNSEYSWTGATKYHLNGRDSLVNPGPAMASHKDNEEKFFPQSGVLIFGKQGSEKTNVDIEKVMITDEEEIRTTNPVATEQYGSVSTNLQRGNRQAATADVNTQGVLPGMVWQDRDVYLQGPIWAKIPHTDGHFHPSPLMGGFGPKHPPPQILIKNTPVPANPSTTFSAAKFASFITQYSTGQVSVEIEWELQKENSKRWNPEIQYTSNYNKSVNVDFTVDTNGVYSEPRPIGTRYLTRNL

SEQ ID NO: 301 - DNA, 2205 bp, Artificial Sequence
  source: /note="Description of Artificial Sequence: Synthetic polynucleotide"
atggctgccgatggttatcttccagattggctcgaggacactctctctgaaggaataagacagtggtggaagctcaaacctggcccaccaccaccaaagcccgcagagcggcataaggacgacagcaggggtcttgtgcttcctgggtacaagtacctcggacccttcaacggactcgacaagggagagccggtcaacgaggcagacgccgcggccctcgagcacgacaaggcctacgaccggcagctcgacagcggagacaacccgtacctcaagtacaaccacgccgacgcggagtttcaggagcgtcttaaagaagatacgtcttttgggggcaacctcggacgagcagtcttccaggcgaaaaagagggttcttgaacctctgggcctggttgaggaacctgttaagacggctccgggaaaaaagaggccggtagagcactctcctgcggagccagactcctcctcgggaaccggaaaagcgggccagcagcctgcaagaaaaagactgaatttcggtcagactggagacgcagactccgtacctgacccccagcctctcagacagccaccagcagcccccacaagtttgggatctactacaatggctacaggcagtggcgcaccaatggcagacaataacgagggtgccgatggagtgggtaattcctcaggaaattggcattgcgattcccaatggctgggcgacagagtcatcaccaccagcacccgaacctgggccctgcccacctacaacaaccacctttacaagcaaatctccagccaatcaggagcctcaaacgacaaccactactttggctacagcaccccctgggggtattttgacttcaacagattccactgccacttttcaccacgtgactggcaaagactcatcaacaacaactggggattccgacccaagagactcaacttcaagctctttaacattcaagtcaaagaggtcacgcagaatgacggtacgacgacgattgccaataaccttaccagcacggttcaggtgtttactgactcggagtaccagctcccgtacgtcctcggctcggcgcatcaaggatgcctcccgccgtttccagcggacgtcttcatggtcccacagtatggatacctcaccctgaacaacgggagtcaggcggtaggacgctcttccttttactgcctggagtactttccttctcagatgctgcgtactggaaacaactttcagttcagctacacttttgaagacgtgcctttccacagcagctacgctcacagccagagtttggatcggctgatgaatcctctgatcgaccagtacctgtattatctaaacagaacacaaacagctagtggaactcagcagtctcggctactgtttagccaagctggacccacaagcatgtctcttcaagctaaaaactggctgcctggaccgtgttatcgccagcagcgtttgtcaaagcaggcaaacgacaacaacaacagcaactttccctggactggagctaccaagtactacctcaatggcagagactctttggtgaacccgggcccggccatggccagccacaaggacgatgaagaaaagtttttccccatgcatggaaccctaatatttggtaaagaaggaacaaatgctaccaacgcggaattggaaaatgtcatgattacagatgaagaggaaatcaggaccaccaatcccgtggctacagagcagtacggatatgtgtcaaataatttgcaaaactcaaatactgctgcaagtactgaaactgtgaatcaccaaggagcattacctggtatggtgtggcaggatcgagacgtgtacctgcagggacccatttgggccaagattcctcacaccgatggacactttcatccttctccactgatgggaggttttggactcaaacacccgcctcctcagattatgatcaaaaacactcccgttccagccaatcctcccacaaacttcagttctgccaagtttgcttccttcatcacacagtattccacgggacaggtcagcgtggagatcgagtgggagctgcagaaggagaacagcaaacgctggaatcccgaaattcagtacacttccaactacaacaaatctgttaatgtggactttactgtggacactaatggtgtgtattcagagcctcgccccattggcaccagatacctgactcgtaatctgtaa

SEQ ID NO: 302 - protein, 734 aa, Artificial Sequence
  source: /note="Description of Artificial Sequence: Synthetic polypeptide"
MAADGYLPDWLEDTLSEGIRQWWKLKPGPPPPKPAERHKDDSRGLVLPGYKYLGPFNGLDKGEPVNEADAAALEHDKAYDRQLDSGDNPYLKYNHADAEFQERLKEDTSFGGNLGRAVFQAKKRVLEPLGLVEEPVKTAPGKKRPVEHSPAEPDSSSGTGKAGQQPARKRLNFGQTGDADSVPDPQPLRQPPAAPTSLGSTTMATGSGAPMADNNEGADGVGNSSGNWHCDSQWLGDRVITTSTRTWALPTYNNHLYKQISSQSGASNDNHYFGYSTPWGYFDFNRFHCHFSPRDWQRLINNNWGFRPKRLNFKLFNIQVKEVTQNDGTTTIANNLTSTVQVFTDSEYQLPYVLGSAHQGCLPPFPADVFMVPQYGYLTLNNGSQAVGRSSFYCLEYFPSQMLRTGNNFQFSYTFEDVPFHSSYAHSQSLDRLMNPLIDQYLYYLNRTQTASGTQQSRLLFSQAGPTSMSLQAKNWLPGPCYRQQRLSKQANDNNNSNFPWTGATKYYLNGRDSLVNPGPAMASHKDDEEKFFPMHGTLIFGKEGTNATNAELENVMITDEEEIRTTNPVATEQYGYVSNNLQNSNTAASTETVNHQGALPGMVWQDRDVYLQGPIWAKIPHTDGHFHPSPLMGGFGLKHPPPQIMIKNTPVPANPPTNFSSAKFASFITQYSTGQVSVEIEWELQKENSKRWNPEIQYTSNYNKSVNVDFTVDTNGVYSEPRPIGTRYLTRNL

SEQ ID NO: 303 - DNA, 3160 bp, Artificial Sequence
  source: /note="Description of Artificial Sequence: Synthetic polynucleotide"
acccttcactaaagggactagtcctgcaggtttaaacgaattcgcccttgctgcgtcaactggaccaatgagaactttcccttcaacgactgtgtcgacaagatggtgatttggtgggaggaggggaagatgaccgccaaggtcgtggagtcggccaaagccattctcggaggaagcaaggtgcgcgtggaccagaaatgcaagtcctcggcccagatagatccgactcccgtgatcgtcacctccaacaccaacatgtgcgccgtgattgacgggaactcaacgaccttcgaacaccagcagccgttgcaagaccggatgttcaaatttgaactcacccgccgtctggatcatgactttgggaaggtcaccaagcgggaagtcaaagactttttccggtgggcaaaggatcacgtggttgaggtggagcatgaattctacgtcaaaaagggtggagccaagaaaagacccgcccctagtgacgcagatataagtgagcccaaacgggtgcgcgagtcagttgcgcagccatcgacgtcagacgcggaagcttcgatcaactacgcggacaggtaccaaaacaaatgttctcgtcacgtgggcatgaatctgatgctgtttccctgcagacaatgcgagagaatgaatcaaaattcaaatatctgcttcactcacggacagaaagactgtttagagtgctttcccgtgtcagaatctcaacctgtttctgtcgtcaaaaaggcgtatcagaaactgtgctacattcatcatatcatgggaaaggtgccagacgcttgcactgcctgcgatctggtcaatgtggatttggatgactgcatctctgaacaataaatgatttaaatcaggtatggctgccgatggttatcttccagattggctcgaggacactctctctgaaggaataagacagtggtggaagctcaaacctggcccaccaccaccaaagcccgcagagcggcataaggacgacagcaggggtcttgtgcttcctgggtacaagtacctcggacccttcaacggactcgacaagggagagccggtcaacgaggcagacgccgcggccctcgagcacgacaaggcctacgaccggcagctcgacagcggagacaacccgtacctcaagtacaaccacgccgacgcggagtttcaggagcgtcttaaagaagatacgtcttttgggggcaacctcggacgagcagtcttccaggcgaaaaagagggttcttgaacctctgggcctggttgaggaacctgttaagacggctccgggaaaaaagaggccggtagagcactctcctgcggagccagactcctcctcgggaaccggaaaagcgggccagcagcctgcaagaaaaagactgaatttcggtcagactggagacgcagactccgtacctgacccccagcctctcagacagccaccagcagcccccacaagtttgggatctactacaatggctacaggcagtggcgcaccaatggcagacaataacgagggtgccgatggagtgggtaattcctcaggaaattggcattgcgattcccaatggctgggcgacagagtcatcaccaccagcacccgaacctgggccctgcccacctacaacaaccacctttacaagcaaatctccagccaatcaggagcctcaaacgacaaccactactttggctacagcaccccctgggggtattttgacttcaacagattccactgccacttttcaccacgtgactggcaaagactcatcaacaacaactggggattccgacccaagagactcaacttcaagctctttaacattcaagtcaaagaggtcacgcagaatgacggtacgacgacgattgccaataaccttaccagcacggttcaggtgtttactgactcggagtaccagctcccgtacgtcctcggctcggcgcatcaaggatgcctcccgccgtttccagcggacgtcttcatggtcccacagtatggatacctcaccctgaacaacgggagtcaggcggtaggacgctcttccttttactgcctggagtactttccttctcagatgctgcgtactggaaacaactttcagttcagctacacttttgaagacgtgcctttccacagcagctacgctcacagccagagtttggatcggctgatgaatcctctgatcgaccagtacctgtattatctaaacagaacacaaacagctagtggaactcagcagtctcggctactgtttagccaagctggacccacaagcatgtctcttcaagctaaaaactggctgcctggaccgtgttatcgccagcagcgtttgtcaaagcaggcaaacgacaacaacaacagcaactttccctggactggagctaccaagtactacctcaatggcagagactctttggtgaacccgggcccggccatggccagccacaaggacgatgaagaaaagtttttccccatgcatggaaccctaatatttggtaaagaaggaacaaatgctaccaacgcggaattggaaaatgtcatgattacagatgaagaggaaatcaggaccaccaatcccgtggctacagagcagtacggatatgtgtcaaataatttgcaaaactcaaatactgctgcaagtactgaaactgtgaatcaccaaggagcattacctggtatggtgtggcaggatcgagacgtgtacctgcagggacccatttgggccaagattcctcacaccgatggacactttcatccttctccactgatgggaggttttggactcaaacacccgcctcctcagattatgatcaaaaacactcccgttccagccaatcctcccacaaacttcagttctgccaagtttgcttccttcatcacacagtattccacgggacaggtcagcgtggagatcgagtgggagctgcagaaggagaacagcaaacgctggaatcccgaaattcagtacacttccaactacaacaaatctgttaatgtggactttactgtggacactaatggtgtgtattcagagcctcgccccattggcaccagatacctgactcgtaatctgtaattgcttgttaatcaataaaccgtttaattcgtttcagttgaactttggtctctgcgaagggcgaattcgcggccgctaaatcaatcg

SEQ ID NO: 304 - protein, 734 aa, Artificial Sequence
  source: /note="Description of Artificial Sequence: Synthetic polypeptide"
MAADGYLPDWLEDTLSEGIRQWWKLKPGPPPPKPAERHKDDSRGLVLPGYKYLGPFNGLDKGEPVNEADAAALEHDKAYDRQLDSGDNPYLKYNHADAEFQERLKEDTSFGGNLGRAVFQAKKRVLEPLGLVEEPVKTAPGKKRPVEHSPAEPDSSSGTGKAGQQPARKRLNFGQTGDADSVPDPQPLGQPPAAPTSLGSTTMATGSGAPMADNNEGADGVGNSSGNWHCDSQWLGDRVITTSTRTWALPTYNNHLYKQISSQSGASNDNHYFGYSTPWGYFDFNRFHCRFSPRDWQRLINNNWGFRPKRLNFKLFNIQVKEVTQNDGTTTIANNLTSTVQVFTDSEYQLPYVLGSAHQGCLPPFPADVFMVPQYGYLTLNNGSQAVGRSSFYCLEYFPSQMLRTGNNFQFSYTFEDVPFHSSYAHSQGLDRLMNPLIDQYLYYLNRTQTASGTQQSRLLFSQAGPTSMSLQAKNWLPGPCYRQQRLSKQANDNNNSNFPWTGATKYHLNGGDSLVNPGPAMASHKDDEEKFFPMHGTLIFGKEGTNATNAELENVMITDEEEIRTTNPVATEQYGYVSNNLQNSNTAASTETVNHQGALPGMVWQDRDVYLRGPIWAKIPHADGHFHPSPLMGGFGLKHPPPQIMIKNTPVPANPPTNFSSAKFASFITQYSTGQVSVEIEWELQKENSKRWNPEIQYTSNYNKSVNVDFTVDTNGVYSEPRPIGTRYLTRNL

SEQ ID NO: 305 - DNA, 3157 bp, Artificial Sequence
  source: /note="Description of Artificial Sequence: Synthetic polynucleotide"
ctcactaagggactagtcctgcaggtttaaacgaattcgcccttgctgcgtcaactggaccaatgagaactttcccttcaacgactgtgtcgacaagatggtgatttggtgggaggaggggaagatgaccgccaaggtcgtggagtcggccaaagccactctcggaggaagcaaggtgcgcgtggaccagaaacgcaagtcctcggcccagatagatccgactcccgtgatcgtcacctccaacaccaacatgtgcgccgtgattgacgggaactcaacgaccttcgaacaccagcagccgttgcaagaccgaatgttcaaatttgaactcacccgccgtctggatcatgacttcgggaaggtcaccaagcaggaagtcaaagactttttccggtgggcaaaggatcacgtggttgaggtggagcatgaattctacgtcaaaaagggtggagccaagaaaagacccgcccctagtgacgcagatataagtgagcccaaacgggtgcgcgagtcagttgcgcagccatcgacgtcagacgcggaagcttcgatcaactacgcggacaggtaccaaaacaaatgttctcgtcacgtgggcatgaatctgatgctgtttccctgcagacaatgcgagagaatgaatcaaaattcaaatatctgcttcactcacggacagaaagactgtttagagtgctttcccgtgtcagaatctcaacctgtttctgtcgtcaaaaaggcgtatcagaaactgtgctacattcatcatatcatgggaaaggtgccagacgcttgcactgcctgcgatctggtcaatgtggatttggatgactgcatctctgaacaataaatgatttaaatcaggtatggctgccgatggttatcttccagattggctcgaggacactctctctgaaggaataagacagtggtggaagctcaaacctggcccaccaccaccaaagcccgcagagcggcataaggacgacagcaggggtcttgtgcttcctgggtacaagtacctcggacccttcaacggactcgacaagggagagccggtcaacgaggcagacgccgcggctctcgagcacgacaaggcctacgaccggcagctcgacagcggagacaacccgtacctcaagtacaaccacgccgacgcggagtttcaggagcgtcttaaagaagatacgtcttttgggggcaacctcggacgagcagtcttccaggcgaaaaagagggttcttgaacctctgggcctggttgaggaacctgttaagacggctccgggaaaaaagaggccggtagagcactctcctgcggagccagactcctcctcgggaaccggaaaagcgggccagcagcctgcaagaaaaagactgaatttcggtcagactggagacgcagactccgtacctgacccccagcctctcggacagccaccagcagcccccacaagtttgggatctactacaatggctacaggcagtggcgcaccaatggcagacaataacgagggtgccgatggagtgggtaattcctcaggaaattggcattgcgattcccaatggctgggcgacagagtcatcaccaccagcacccgaacctgggccctgcccacctacaacaaccacctttacaagcaaatctccagccaatcaggagcctcaaacgacaaccactactttggctacagcaccccctgggggtattttgacttcaacagattccactgccgcttttcaccacgtgactggcaaagactcatcaacaacaactggggattccgacccaagagactcaacttcaagctctttaacattcaagtcaaagaggtcacgcagaatgacggtacgacgacgattgccaataaccttaccagcacggttcaggtgtttactgactcggagtaccagctcccgtacgtcctcggctcggcgcatcaaggatgcctcccgccgtttccagcggacgtcttcatggtcccacagtatggatacctcaccctgaacaacgggagtcaggcggtaggacgctcttccttttactgcctggagtactttccttctcagatgctgcgtactggaaacaactttcagttcagctacacttttgaagacgtgcctttccacagcagctacgctcacagccagggtttggatcggctgatgaatcctctgatcgaccagtacctgtattatctaaacagaacacaaacagctagtggaactcagcagtctcggctactgtttagccaagctggacccacaagcatgtctcttcaagctaaaaactggctgcctggaccgtgttatcgccagcagcgtttgtcaaagcaggcaaacgacaacaacaacagcaactttccctggactggagctaccaagtaccacctcaatggcggagactctttggtgaacccgggcccggccatggccagccacaaggacgatgaagaaaagtttttccccatgcatggaaccctaatatttggtaaagaaggaacaaatgctaccaacgcggaattggaaaatgtcatgattacagatgaagaggaaatcaggaccaccaatcccgtggctacagagcagtacggatatgtgtcaaataatttgcaaaactcaaatactgctgcaagtactgaaactgtgaatcaccaaggagcattacctggtatggtgtggcaggatcgagacgtgtacctgcggggacccatttgggccaagattcctcacgccgatggacactttcatccttctccactgatgggaggttttggactcaaacacccgcctcctcagattatgatcaaaaacactcccgttccagccaatcctcccacaaacttcagttctgccaagtttgcttccttcatcacacagtattccacgggacaggtcagcgtggagatcgagtgggagctgcagaaggagaacagcaaacgctggaatcccgaaattcagtacacttccaactacaacaaatctgttaatgtggactttactgtggacactaatggtgtgtattcagagcctcgccccattggcaccagatacctgactcgtaatctgtaattgcttgttaatcaataaaccgtttaattcgtttcagttgaactttggtctctgcgaagggcgaattcgcggccgctaaattcaattcg

SEQ ID NO: 306 - protein, 734 aa, Artificial Sequence
  source: /note="Description of Artificial Sequence: Synthetic polypeptide"
MAADGYLPDWLEDTLSEGIRQWWKLKPGPPPPKPAERHKDDSRGLVLPGYKYLGPFNGLDKGEPVNEADAAALEHDKAYDRQLDSGDNPYLKYNHADAEFQERLKEDTSFGGNLGRAVFQAKKRVLEPLGLVEEPVKTAPGKKRPVEHSPAEPDSSSGTGKAGQQPARKRLNFGQTGDADSVPDPQPLGQPPAAPTSLGSTTMATGSGAPMADNNEGADGVGNSSGNWHCDSQWLGDRVITTSTRTWALPTYNNHLYKQISSQSGASNDNHYFGYSTPWGYFDFNRFHCHFSPRDWQRLINNNWGFRPKRLNFKLFNIQVKEVTQNDGTTTIANNLTSTVQVFTDSEYQLPYVLGSAHQGCLPPFPADVFMVPQYGYLTLNNGSQAVGRSSFYCLECFPSQMLRTGNNFQFSYTFEDVPFHSSYAHSQSLDRLMNPLIDQYLYYLNRTQTASGTQQSRLLFSQAGPTSMSLQAKNWLPGPCYRQQRLSKQANDNNNSNFPWTGATKYHLNGRDSLVNPGPAMASHKDDEEKFFPMHGTLIFGKEGTNATNAELENVMITDEEEIRTTNPVATEQYGYVSNNLQNSNTAASTETVNHQGALPGMVWQDRDVYLQGPIWAKIPHTDGHFHPSPLMGGFGLKHPPPQIMIKNTPVPANPPTNFSSAKFASFITQYSTGQVSVEIEWELQKENSKRWNPEIQYTSNYNKSVNVDFTVDTNGVYSEPRPIGTRYLTRNL

SEQ ID NO: 307 - DNA, 2208 bp, Artificial Sequence
  source: /note="Description of Artificial Sequence: Synthetic polynucleotide"
atggctgccgatggttatcttccagattggctcgaggacactctctctgaaggaataagacagtggtggaagctcaaacctggcccaccaccaccaaagcccgcagagcggcataaggacgacagcaggggtcttgtgcttcctggatacaagtacctcggacccttcaacggactcgacaagggagagccggtcaacgaggcagacgccgcggccctcgagcacgacaaggcctacgaccggcagctcgacagcggagacaacccgtacctcaagtacaaccacgccgacgcggagtttcaggagcgccttaaagaagatacgtcttttgggggcaacctcggacgagcagtcttccaggcgaaaaagagggttcttgaacctctgggcctggttgaggaacctgttaagacggctccgggaaaaaagaggccggtagagcactctcctgtggagccagactcctcctcgggaaccggaaaagcgggcaaccagcctgcaagaaaaagattgaatttcggtcagactggagacgcagactccgtacctgacccccagcctctcggacagccaccagcatccccctctggtctgggaactaatacgatggctacaggcagtggcgcaccaatggcagacaataacgagggcgccgacggagtgggtaattcctcgggaaattggcattgcgattccacatggatgggcgacagagtcgtcaccaccagcacccgcacctgggccctgcccacctacaacaaccacctctacaagcagatttccagccaatcaggagccagcaacgacaaccactactttggctacagcaccccttgggggtattttgacttcaacagattccactgccacttttcgccacgcgactggcagagactcatcaacaacaactggggattccggcccaaaagactcaacttcaagctgtttaacattcaagtcaaggaggtcacgcagaatgacggtacgacgacgattgccaataaccttaccagcacggttcaggtgtttactgacttggagtaccagctcccgtacgtcctcggctcggcgcatcaaggatgcctcccgccgttcccagcagacgtcttcatggtgccacagtatggatacctcaccctgaacaacgggagtcaggcggtaggacgctcttccttttactgcctggagtactttccttctcagatgcttcgcaccggaaacaactttaccttcagctacacttttgaagacgttcctttccacagcagctacgctcacagtcaaagtctggaccgtctcatgaatcctctcatcgaccagtacctgtattacttgagcagaacaaacactccaagcggaaccactacgcagtccaggcttcagttttctcaggccggagcgagtgacattcgggaccagtctaggaactggcttcctggaccctgttaccgccagcagcgagtatcaaagacagctgcggataacaacaacagtgaatactcgtggactggagctaccaagtaccacctcaatggcagagactctctggtgaatccgggcccggccatggccagccacaaggacgatgaagaaaagttttttcctcaaagcggggttctcatctttgggaagcaaggctcagagaaaacaaatgtggacattgaaaaggtcatgattacagacgaagaggaaatcaggaccaccaatcccgtggctacggagcagtatggttctgtatctaccaacctccagagcggcaacacacaagcagctacctcagatgtcaacacacaaggcgttcttccaggcatggtctggcaggacagagacgtgtacctgcaggggcccatctgggcaaaaattccacacacggacggacattttcacccctctcccctcatgggcggatttggacttaaacaccctcctccacagattctcattaagaataccccggtacctgcgaatccttcgaccaccttcagcgcggcaaagtttgcttccttcatcacacagtattccacggggcaggtcagcgtggagatcgagtgggagctgcagaaggagaacagcaaacgctggaatcccgaaattcagtacacttccaactacaacaaatctgttaatgtggactttactgtggacactaatggggtgtattcagagcctcgccctattggcaccagatacctgactcgtaatctgtaa

SEQ ID NO: 308 - DNA, 3159 bp, Artificial Sequence
  source: /note="Description of Artificial Sequence: Synthetic polynucleotide"
gattgatttagcggccgcgaattcgcccttgctgcgtcaactggaccaatgagaactttcccttcaacgattgcgtcgacaagatggtgatctggtgggaggagggaaagatgaccgccaaggtcgtggagtcggccaaagccattctcggaggaagcaaggtgcgtgtggaccaaaagtgcaagtcttcggcccagatcgacccgactcccgtgatcgtcacctccaacaccaacatgtgcgccgtgattgatggaaactcaacgaccttcgagcaccagcagccgttgcaagaccggatgttcaaatttgaacttacccgccgtctggatcatgactttggaaaggtcaccaagcaggaagtgaaagactttttccggtgggcaaaggatcacgtggttgaggtggagcatgagttctacgtcaaaaagggtggagccaaaaaaagacccgcccccagtgacgcagatataagtgagcccaaacgggcgcgcgagtcagttgcgcagccatcgacgtcagacgcggaagcttcgatcaactacgcggacaggtaccaaaacaaatgttctcgtcacgtgggcatgaatctgatgctgtttccctgcagacaatgcgagagaatgaatcagaattcaaatatctgcttcactcacggacagaaagactgtccatagtgctttcccgtgtcagaatctcaacccgtttctgtcgtcaaaaaggcgtatcagaaactgtgctacattcatcacatcatgggaaaggtgccagacgcttgcactgcttgcgacctggtcaatgtggatttggatgactgcatctctgaacaataaatgatttaaatcaggtatggctgccgatggttatcttccagattggctcgaggacactctctctgaaggaataagacagtggtggaagctcaaacctggcccaccaccaccaaagcccgcagagcggcataaggacgacagcaggggtcttgtgcttcctggatacaagtacctcggacccttcaacggactcgacaagggagagccggtcaacgaggcagacgccgcggccctcgagcacgacaaggcctacgaccggcagctcgacagcggagacaacccgtacctcaagtacaaccacgccgacgcggagtttcaggagcgccttaaagaagatacgtcttttgggggcaacctcggacgagcagtcttccaggcgaaaaagagggttcttgaacctctgggcctggttgaggaacctgttaagacggctccgggaaaaaagaggccggtagagcactctcctgtggagccagactcctcctcgggaaccggaaaagcgggcaaccagcctgcaagaaaaagattgaatttcggtcagactggagacgcagactccgtacctgacccccagcctctcggacagccaccagcatccccctctggtctgggaactaatacgatggctacaggcagtggcgcaccaatggcagacaataacgagggcgccgacggagtgggtaattcctcgggaaattggcattgcgattccacatggatgggcgacagagtcgtcaccaccagcacccgcacctgggccctgcccacctacaacaaccacctctacaagcagatttccagccaatcaggagccagcaacgacaaccactactttggctacagcaccccttgggggtattttgacttcaacagattccactgccacttttcgccacgcgactggcagagactcatcaacaacaactggggattccggcccaaaagactcaacttcaagctgtttaacattcaagtcaaggaggtcacgcagaatgacggtacgacgacgattgccaataaccttaccagcacggttcaggtgtttactgacttggagtaccagctcccgtacgtcctcggctcggcgcatcaaggatgcctcccgccgttcccagcagacgtcttcatggtgccacagtatggatacctcaccctgaacaacgggagtcaggcggtaggacgctcttccttttactgcctggagtactttccttctcagatgcttcgcaccggaaacaactttaccttcagctacacttttgaagacgttcctttccacagcagctacgctcacagtcaaagtctggaccgtctcatgaatcctctcatcgaccagtacctgtattacttgagcagaacaaacactccaagcggaaccactacgcagtccaggcttcagttttctcaggccggagcgagtgacattcgggaccagtctaggaactggcttcctggaccctgttaccgccagcagcgagtatcaaagacagctgcggataacaacaacagtgaatactcgtggactggagctaccaagtaccacctcaatggcagagactctctggtgaatccgggcccggccatggccagccacaaggacgatgaagaaaagttttttcctcaaagcggggttctcatctttgggaagcaaggctcagagaaaacaaatgtggacattgaaaaggtcatgattacagacgaagaggaaatcaggaccaccaatcccgtggctacggagcagtatggttctgtatctaccaacctccagagcggcaacacacaagcagctacctcagatgtcaacacacaaggcgttcttccaggcatggtctggcaggacagagacgtgtacctgcaggggcccatctgggcaaaaattccacacacggacggacattttcacccctctcccctcatgggcggatttggacttaaacaccctcctccacagattctcattaagaataccccggtacctgcgaatccttcgaccaccttcagcgcggcaaagtttgcttccttcatcacacagtattccacggggcaggtcagcgtggagatcgagtgggagctgcagaaggagaacagcaaacgctggaatcccgaaattcagtacacttccaactacaacaaatctgttaatgtggactttactgtggacactaatggggtgtattcagagcctcgccctattggcaccagatacctgactcgtaatctgtaattgcttgttaatcaataaaccgtttaattcgtttcagttgaactttggtctctgcgaagggcgaattcgtttaaacctgcaggactagtccctttagtgagg

SEQ ID NO: 309 - protein, 735 aa, Artificial Sequence
  source: /note="Description of Artificial Sequence: Synthetic polypeptide"
MAADGYLPDWLEDTLSEGIRQWWKLKPGPPPPKPAERHKDDSRGLVLPGYKYLGPFNGLDKGEPVNEADAAALEHDKAYDRQLDSGDNPYLKYNHADAEFQERLKEDTSFGGNLGRAVFQAKKRVLEPLGLVEEPVKTAPGKKRPVEHSPVEPDSSSGTGKAGNQPARKRLNFGQTGDADSVPDPQPLGQPPASPSGLGTNTMATGSGAPMADNNEGADGVGNSSGNWHCDSTWMGDRVVTTSTRTWALPTYNNHLYKQISSQSGASNDNHYFGYSTPWGYFDFNRFHCHFSPRDWQRLINNNWGFRPKRLNFKLFNIQVKEVTQNDGTTTIANNLTSTVQVFTDLEYQLPYVLGSAHQGCLPPFPADVFMVPQYGYLTLNNGSQAVGRSSFYCLEYFPSQMLRTGNNFTFSYTFEDVPFHSSYAHSQSLDRLMNPLIDQYLYYLSRTNTPSGTTTQSRLQFSQAGASDIRDQSRNWLPGPCYRQQRVSKTAADNNNSEYSWTGATKYHLNGRDSLVNPGPAMASHKDDEEKFFPQSGVLIFGKQGSEKTNVDIEKVMITDEEEIRTTNPVATEQYGSVSTNLQSGNTQAATSDVNTQGVLPGMVWQDRDVYLQGPIWAKIPHTDGHFHPSPLMGGFGLKHPPPQILIKNTPVPANPSTTFSAAKFASFITQYSTGQVSVEIEWELQKENSKRWNPEIQYTSNYNKSVNVDFTVDTNGVYSEPRPIGTRYLTRNL

SEQ ID NO: 310 - DNA, 2205 bp, Artificial Sequence
  source: /note="Description of Artificial Sequence: Synthetic polynucleotide"
atggctgccgatggttatcttccagattggctcgaggacactctctctgaaggaataagacagtggtggaagctcaaacctggcccaccaccaaagcccgcagagcggcataaggacgacagcaggggtcttgtgcttcctggatacaagtacctcggacccttcaacggactcgacaagggagagccggtcaacgaggcagacgccgcggccctcgagcacgacaaggcctacgaccggcagctcgacagcggagacaacccgtacctcaagtacaaccacgccgacgcggagtttcaggagcgccttaaagaagatacgtcttttgggggcaacctcggacgagcagtcttccaggcgaaaaagagggttcttgaacctctgggcctggttgaggaacctgttaagacggctccgggaaaaaagaggcccgtagagcactctcctgtggagccagactcctcctcgggaaccggaaaagcgggcaaccagcctgcaagaaaaagattgaatttcggtcagactggagacgcagactccgtacctgacccccagcctctcggacagccaccagcagccccctctggtctgggaactaatacgatggctacaggcagtggcgcaccaatggcagacaataacgagggcgccgacggagtgggtaattcctcgggagattggcattgcgattccacatggatgggcgacagagtcatcaccaccagcacccgcacctgggccctgcccacctacaacaaccacctctacaagcagatttccagccaatcaggagccagcaatgacaaccactactttggctacagcaccccttgggggtattttgacttcaacagattccactgccacttttcgccacgcgactggcagagactcatcaacaacaactggggattccggcccaaaagactcaacctcaagctgtttaacattcaagtcaaggaggtcacgcagaatgacggtacgacgacgattgccaataaccttaccagcacggttcaggtgtttactgacttggagtaccagctcccgtacgtcctcggctcggcgcatcaaggatgcctcccgccgttcccagcagacgtcttcatggtgccacagtatggatacctcaccctgaacaacgggagtcaggcggtaggacgctcttccttttactgcctggagtactttccttctcagatgcttcgtaccggaaacaactttaccttcagctacacttttgaagacgttcctttccacagcagctacgctcacagtcaaagtctggaccgtctcatgaatcctctcatcgaccagtacctgtattacttgagcagaacaaacactccaagcggaaccactacgcagtccaggcttcagttttctcaggccggagcgagtgacattcgggaccagtctaggaactggcttcctggaccctgttaccgccagcagcgagtatcaaagacagctgcggataacaacaacggtgaatactcgtggactggagctaccaagtaccacctcaatggcagagactctctggtgaatccgggcccggccatggccagccacaaggacgatgaagaaaagttttttcctcaaagcggggttctcatctttgggaagcaaggctcagagaaaacaaatgtggacattgaaaaggtcatgattacagacgaagaggaaatcaggaccaccaatcccgtggctacggagcagtatggttctgtatctaccaacctccagagcggcaacacacgagcagctacctcagatgtcaacacacaaggcgttcttccaggcatggtctggcaggacagagacgtgtacctgcaggggcccatctgggcaaaaattccacacacggacggacattttcacccctctcccctcatgggcggatttggacttaaacaccctcctccacagattctcattaagaataccccggtacctgcgaatccttcgaccaccttcagcgcggcaaagtttgcttccttcatcacacagtattccacggggcaggtcagcgtggagatcgagtgggagctgcagaaggagaacagcaaacgctggaatcccgaaattcagtacacttccaactacaacaaatctgttaatgtggactttactgtggacactaatggggtgtattcagagcctcgccctattggcaccagatacctgactcgtaatctgtaa

SEQ ID NO: 311 - DNA, 3156 bp, Artificial Sequence
  source: /note="Description of Artificial Sequence: Synthetic polynucleotide"
cgattgaatttagcggccgcgaattcgcccttgctgcgtcaacggaccaatgagaactttcccttcaacgattgcgtcgacaagatggtgatctggtgggaggagggaaagatgaccgccaaggtcgtggagtcggccaaagccattctcggaggaagcaaggtgcgtgtggaccaaaagtgcaagtcttcggcccagatcgacccgactcccgtgatcgtcacctccaacaccaacatgtgcgccgtgattgatggaaactcaacgaccttcgagcaccagcagccgttgcaagaccggatgttcaaatttgaacttacccgccgtctggatcatgactttggaaaggtcaccaagcaggaagtgaaagactttttccggtgggcaaaggatcacgtggttgaggtggagcatgagttctacgtcaaaaagggtggagccaaaaaaagacccgcccccagtgacgcagatataagtgagcccaaacgggcgcgcgagtcagttgcgcagccatcgacgtcagacgcggaagcttcgatcaactacgcggacaggtaccaaaacaaatgttctcgtcacgtgggcatgaatctgatgctgtttccctgcagacaatgcgagcgaatgaatcagaattcaaatatctgcttcactcacggacagaaagactgtttagagtgctttcccgtgtcagaatctcaacccgtttctgtcgtcaaaaaggcgtatcagaaactgtgctacattcatcacatcatgggaaaggtgccagacgcttgcactgcttgcgacctggtcaatgtggatttggatgactgcatctctgaacaataaatgatttaaatcaggtatggctgccgatggttatcttccagattggctcgaggacactctctctgaaggaataagacagtggtggaagctcaaacctggcccaccaccaaagcccgcagagcggcataaggacgacagcaggggtcttgtgcttcctggatacaagtacctcggacccttcaacggactcgacaagggagagccggtcaacgaggcagacgccgcggccctcgagcacgacaaggcctacgaccggcagctcgacagcggagacaacccgtacctcaagtacaaccacgccgacgcggagtttcaggagcgccttaaagaagatacgtcttttgggggcaacctcggacgagcagtcttccaggcgaaaaagagggttcttgaacctctgggcctggttgaggaacctgttaagacggctccgggaaaaaagaggcccgtagagcactctcctgtggagccagactcctcctcgggaaccggaaaagcgggcaaccagcctgcaagaaaaagattgaatttcggtcagactggagacgcagactccgtacctgacccccagcctctcggacagccaccagcagccccctctggtctgggaactaatacgatggctacaggcagtggcgcaccaatggcagacaataacgagggcgccgacggagtgggtaattcctcgggagattggcattgcgattccacatggatgggcgacagagtcatcaccaccagcacccgcacctgggccctgcccacctacaacaaccacctctacaagcagatttccagccaatcaggagccagcaatgacaaccactactttggctacagcaccccttgggggtattttgacttcaacagattccactgccacttttcgccacgcgactggcagagactcatcaacaacaactggggattccggcccaaaagactcaacctcaagctgtttaacattcaagtcaaggaggtcacgcagaatgacggtacgacgacgattgccaataaccttaccagcacggttcaggtgtttactgacttggagtaccagctcccgtacgtcctcggctcggcgcatcaaggatgcctcccgccgttcccagcagacgtcttcatggtgccacagtatggatacctcaccctgaacaacgggagtcaggcggtaggacgctcttccttttactgcctggagtactttccttctcagatgcttcgtaccggaaacaactttaccttcagctacacttttgaagacgttcctttccacagcagctacgctcacagtcaaagtctggaccgtctcatgaatcctctcatcgaccagtacctgtattacttgagcagaacaaacactccaagcggaaccactacgcagtccaggcttcagttttctcaggccggagcgagtgacattcgggaccagtctaggaactggcttcctggaccctgttaccgccagcagcgagtatcaaagacagctgcggataacaacaacggtgaatactcgtggactggagctaccaagtaccacctcaatggcagagactctctggtgaatccgggcccggccatggccagccacaaggacgatgaagaaaagttttttcctcaaagcggggttctcatctttgggaagcaaggctcagagaaaacaaatgtggacattgaaaaggtcatgattacagacgaagaggaaatcaggaccaccaatcccgtggctacggagcagtatggttctgtatctaccaacctccagagcggcaacacacgagcagctacctcagatgtcaacacacaaggcgttcttccaggcatggtctggcaggacagagacgtgtacctgcaggggcccatctgggcaaaaattccacacacggacggacattttcacccctctcccctcatgggcggatttggacttaaacaccctcctccacagattctcattaagaataccccggtacctgcgaatccttcgaccaccttcagcgcggcaaagtttgcttccttcatcacacagtattccacggggcaggtcagcgtggagatcgagtgggagctgcagaaggagaacagcaaacgctggaatcccgaaattcagtacacttccaactacaacaaatctgttaatgtggactttactgtggacactaatggggtgtattcagagcctcgccctattggcaccagatacctgactcgtaatctgtaattgcttgttaatcaataaaccgtttaattcgtttcagttgaactttggtctctgcgaagggcgaattcgtttaaacctgcaggactagtccctttagtgag

SEQ ID NO: 312 - protein, 734 aa, Artificial Sequence
  source: /note="Description of Artificial Sequence: Synthetic polypeptide"
MAADGYLPDWLEDTLSEGIRQWWKLKPGPPPKPAERHKDDSRGLVLPGYKYLGPFNGLDKGEPVNEADAAALEHDKAYDRQLDSGDNPYLKYNHADAEFQERLKEDTSFGGNLGRAVFQAKKRVLEPLGLVEEPVKTAPGKKRPVEHSPVEPDSSSGTGKAGNQPARKRLNFGQTGDADSVPDPQPLGQPPAAPSGLGTNTMATGSGAPMADNNEGADGVGNSSGDWHCDSTWMGDRVITTSTRTWALPTYNNHLYKQISSQSGASNDNHYFGYSTPWGYFDFNRFHCHFSPRDWQRLINNNWGFRPKRLNLKLFNIQVKEVTQNDGTTTIANNLTSTVQVFTDLEYQLPYVLGSAHQGCLPPFPADVFMVPQYGYLTLNNGSQAVGRSSFYCLEYFPSQMLRTGNNFTFSYTFEDVPFHSSYAHSQSLDRLMNPLIDQYLYYLSRTNTPSGTTTQSRLQFSQAGASDIRDQSRNWLPGPCYRQQRVSKTAADNNNGEYSWTGATKYHLNGRDSLVNPGPAMASHKDDEEKFFPQSGVLIFGKQGSEKTNVDIEKVMITDEEEIRTTNPVATEQYGSVSTNLQSGNTRAATSDVNTQGVLPGMVWQDRDVYLQGPIWAKIPHTDGHFHPSPLMGGFGLKHPPPQILIKNTPVPANPSTTFSAAKFASFITQYSTGQVSVEIEWELQKENSKRWNPEIQYTSNYNKSVNVDFTVDTNGVYSEPRPIGTRYLTRNL

SEQ ID NO: 313 - DNA, 2208 bp, Artificial Sequence
  source: /note="Description of Artificial Sequence: Synthetic polynucleotide"
atggctgccgatggttatcttccagattggctcgaggacactctctctgaaggaataagacagtggtggaagctcaaacctggcccaccaccaccaaagcccgcagagcggcataaggacgacagcaggggtcttgtgcttcctgggtacaagtacctcggacccttcaacggactcgacaagggagagccggtcaacgaggcagacgccgcggccctcgagcacgacaaggcctacgaccggcagctcgacagcggagacaacccgtacctcaagtacgaccacgccgacgcggagtttcaggagcgccttaaagaagatacgtcttttgggggcaacctcggacgagcagtcttccaggcaaaaaagagggttcttgaacctctgggcctggttgaggagcctgttaagacggctccgggaaaaaagaggccggtagagcactctcctgtggagccagactcctcctcgggaaccggaaaagcgggcaaccagcctgcaagaaagagattgaatttcggtcagactggagacgcagactccgtacctgacccccagcctctcggacagccaccagcagccccctctggtctgggaactaatacgatggctacaggcagtggcgcaccaatggcagacaataacgatggcgccgacggagtgggtaattcctcgggaaattggcattgcgattccacatggatgggcgacagagtcatcaccaccagcacccgaacctgggctctgcccacctacaacaaccatctgtacaagcagatttccagccaatcaggagccagcaacgacaaccactactttggctacagcaccccttgggggtattttgacttcaacagattccactgccacttttcaccacgtgactggcaaagactcatcaacaacaactggggattccggcccaagagactcaacttcaagctctttaacattcaagtcagagaggtcacgcagaatgatggtacgacgacgattgccaataaccttaccagcacggttcaggtgtttactgactcggagtaccagctcccgtacgtcctcggctcggcgcatcaaggatgcctcccgccgttcccagcagacgtcttcatggtgccacagtatggatacctcaccctgaacaacgggagtcaggcagtaggacgctcttcattttactgcctggagtacttcccttctcagatgctgcgtaccggaaacaactttaccttcagctacacctttgaggatgttcctttccacagcagctacgctcacagccagagtttggaccgtctcatgaatcctctcatcgaccagtacctgtattacttgagcagaacaaacactccaagcggaaccaccacgcagtccaggcttcagttttctcaggccggagcgagtgacattcgggatcagtctaggaactggcttcctggaccctgttaccgccagcagcgagtatcaaagacatctgcggacaacaacaacagtgaatactcgtggattggagctaccaagtaccacctcaatggcagagactctctggtgaatccgggcccggcaatggccagccacaaggacgatgaagaaaagttttttcctcagagcggggttctcatctttggaaaacaaggatcagagaaaacaaatgtggacattgaaaaggtcatgattacagacgaagaggaaatcagaaccaccaatcccgtggccacggagcagtatggttctgtatctaccaacctccagagcggcaacacacaagcatctactgcagatgtcaacacacaaggcgttcttccaggcatggtctggcaggacagagacgtgtacctgcaggggcctatctgggcaaagattccgcacacggacggacattttcacccctctcccctcatgggcggattcggacttaaacaccctcctccacagattctcatcaaaaacaccccggtacctgcgaatccttcgaccaccttcagtgcggcaaagtttgcttccttcatcacacagtattccacggggcgggtcagcgtggagatcgagtgggagctacagaaggagaacagcaaacgctggaatcccgagatccagtacacttccaactacaacaaatctgttaatgtggactttactgtggacactaatggtgtgtattcagagcctcgccccattggcaccagatacctgactcgtaatctgtaa

SEQ ID NO: 314 - protein, 735 aa, Artificial Sequence
  source: /note="Description of Artificial Sequence: Synthetic polypeptide"
MAADGYLPDWLEDTLSEGIRQWWKLKPGPPPPKPAERHKDDSRGLVLPGYKYLGPFNGLDKGEPVNEADAAALEHDKAYDRQLDSGDNPYLKYDHADAEFQERLKEDTSFGGNLGRAVFQAKKRVLEPLGLVEEPVKTAPGKKRPVEHSPVEPDSSSGTGKAGNQPARKRLNFGQTGDADSVPDPQPLGQPPAAPSGLGTNTMATGSGAPMADNNDGADGVGNSSGNWHCDSTWMGDRVITTSTRTWALPTYNNHLYKQISSQSGASNDNHYFGYSTPWGYFDFNRFHCHFSPRDWQRLINNNWGFRPKRLNFKLFNIQVREVTQNDGTTTIANNLTSTVQVFTDSEYQLPYVLGSAHQGCLPPFPADVFMVPQYGYLTLNNGSQAVGRSSFYCLEYFPSQMLRTGNNFTFSYTFEDVPFHSSYAHSQSLDRLMNPLIDQYLYYLSRTNTPSGTTTQSRLQFSQAGASDIRDQSRNWLPGPCYRQQRVSKTSADNNNSEYSWIGATKYHLNGRDSLVNPGPAMASHKDDEEKFFPQSGVLIFGKQGSEKTNVDIEKVMITDEEEIRTTNPVATEQYGSVSTNLQSGNTQASTADVNTQGVLPGMVWQDRDVYLQGPIWAKIPHTDGHFHPSPLMGGFGLKHPPPQILIKNTPVPANPSTTFSAAKFASFITQYSTGRVSVEIEWELQKENSKRWNPEIQYTSNYNKSVNVDFTVDTNGVYSEPRPIGTRYLTRNL

SEQ ID NO: 315 - DNA, 2217 bp, Artificial Sequence
  source: /note="Description of Artificial Sequence: Synthetic polynucleotide"
atggctgccgatggttatcttccagattggctcgaggacaacctctctgagggcattcgcgagtggtgggacttgaaacctggagccccgaaacccaaagccaaccagcaaaagcaggacgacggccggggtctggtgcttcctggctacaagtacctcggacccttcaacggactcgacaagggggagcccgtcaacgcggcggacgcagcggccctcgagcacgacaaggcctacgaccagcagctcaaagcgggtgacaatccgtacctgcggtataaccacgccgacgccgagtttcaggagcgtctgcaagaagatacgtcttttgggggcaacctcgggcgagcagtcttccaggccaagaagcgggttctcgaacctctcggtctggttgaggaaggcgctaagacggctcctggaaagaagagaccggtagagccatcaccccagcgttctccagactcctctacgggcatcggcaagacaggccagcagcccgcgaaaaagagactcaactttgggcagactggcgactcagagtcagtgcccgaccctcaaccaatcggagaaccccccgcaggcccctctggtctgggatctggtacaatggctgcaggcggtggcgctccaatggcagacaataacgaaggcgccgacggagtgggtagttcctcaggaaattggcattgcgattccgcatggctgggcgacagagtcatcaccaccagcacccgaccctgggccctccccacctacaacaaccacctctacaagcaaatctccaacgggacatcgggaggaagcaccaacgacaacacctacttcggctacagcaccccctgggggtattttgactttaacagattccactgccacttctcaccacgtgactggcagcgactcatcaacaacaactggggattccggcccaagagactcaacttcaagctcttcaacatccaggtcaaggaggtcacgcagaatgaaggcaccaagaccatcgccaataaccttaccagcacgattcaggtctttacggactcggaataccagctcccgtacgtcctcggctctgcgcaccagggctgcccgcctccgttcccggcggacgtcttcatgattcctcagtacgggtacctgactctgaacaacggcagtcaggccgtgggccgttcctccttctactgcctggagtactttccttctcaaatgcggagaacgggcaacaactttgagttcagctaccagtttgaggacgtgccttttcacagcagctacgcgcatagccaaagcctggaccggctgatgaaccccctcatcgaccagtacctgtactacctgtctcggactcagtccacgggaggtaccgcaggaactcagcagttgctattttctcaggccgggcctaataacatgtcggctcaggccaaaaactggctacccgggccctgctaccggcagcaacgcgtctccacgacactgtcgcaaaataacaacagcaactttgcttggaccggtgccaccaagtatcatctgaatggcagagactctctggtaaatcccggtgtcgctatggcaacgcacaaggacgacgaagagcgattttttccatccagcggagtcttgatgtttgggaaacagggagctggaaaagacaacgtggactatagcagcgttatgctaaccagtgaggaagaaatcaaaaccaccaacccagtggccacagaacagtacggcgtggtggccgataacctgcaacagcaaaacgccgctcctattgtaggggccgtcaacagtcaaggagccttacctggcatggtctggcagaaccgggacgtgtacctgcagggtcctatctgggccaagattcctcacacggacggcaactttcatccttcgccgctgatgggaggctttggactgaaacacccgcctcctcagatcctgattaagaatacacctgttcccgcggatcctccaactaccttcagtcaagccaagctggcgtcgttcatcacgcagtacagcaccggacaggtcagcgtggaaattgaatgggagctgcagaaagagaacagcaagcgctggaacccagagattcagtatacttccaactactacaaatctacaaatgtggactttgctgtcaatactgagggtacttattcagagcctcgccccattggcacccgttacctcacccgtaacctgtaa

SEQ ID NO: 316 - protein, 738 aa, Artificial Sequence
  source: /note="Description of Artificial Sequence: Synthetic polypeptide"
MAADGYLPDWLEDNLSEGIREWWDLKPGAPKPKANQQKQDDGRGLVLPGYKYLGPFNGLDKGEPVNAADAAALEHDKAYDQQLKAGDNPYLRYNHADAEFQERLQEDTSFGGNLGRAVFQAKKRVLEPLGLVEEGAKTAPGKKRPVEPSPQRSPDSSTGIGKTGQQPAKKRLNFGQTGDSESVPDPQPIGEPPAGPSGLGSGTMAAGGGAPMADNNEGADGVGSSSGNWHCDSAWLGDRVITTSTRPWALPTYNNHLYKQISNGTSGGSTNDNTYFGYSTPWGYFDFNRFHCHFSPRDWQRLINNNWGFRPKRLNFKLFNIQVKEVTQNEGTKTIANNLTSTIQVFTDSEYQLPYVLGSAHQGCPPPFPADVFMIPQYGYLTLNNGSQAVGRSSFYCLEYFPSQMRRTGNNFEFSYQFEDVPFHSSYAHSQSLDRLMNPLIDQYLYYLSRTQSTGGTAGTQQLLFSQAGPNNMSAQAKNWLPGPCYRQQRVSTTLSQNNNSNFAWTGATKYHLNGRDSLVNPGVAMATHKDDEERFFPSSGVLMFGKQGAGKDNVDYSSVMLTSEEEIKTTNPVATEQYGVVADNLQQQNAAPIVGAVNSQGALPGMVWQNRDVYLQGPIWAKIPHTDGNFHPSPLMGGFGLKHPPPQILIKNTPVPADPPTTFSQAKLASFITQYSTGQVSVEIEWELQKENSKRWNPEIQYTSNYYKSTNVDFAVNTEGTYSEPRPIGTRYLTRNL

SEQ ID NO: 317 - protein, 735 aa, Artificial Sequence
  source: /note="Description of Artificial Sequence: Synthetic polypeptide"
MAADGYLPDWLEDTLSEGIRQWWKLKPGPPPPKPAERHKDDSRGLVLPGYKYLGPFNGLDKGEPVNEADAAALEHDKAYDRQLDSGDNPYLKYNHADAEFQERLKEDTSFGGNLGRAVFQAKKRVLEPLGLVEEPVKTAPGKKRPVEHSPVEPDSSSGTGKAGQQPARKRLNFGQTGDADSVPDPQPLGQPPAAPSGLGSTTMATGSGAPMADNNEGADGVGNSSGNWHCDSQWLGDRVITTSTRTWALPTYNNHLYKQISSQSGASNDNHYFGYSTPWGYFDFNRFHCHFSPRDWQRLINNNWGFRPKRLNFKLFNIQVKEVTQNDGTTTIANNLTSTVQVFTDSEYQLPYVLGSAHQGCLPPFPADVFMVPQYGYLTLNNGSQAVGRSSFYCLEYFPSQMLRTGNNFQFSYTFEDVPFHSSYAHSQSLDRLMNPLVDQYLYYLNKTQTNSGTLQQSRLLFSQAGPTNMSLQAKNWLPGPCYRQQRLSKQANDNNNSNFPWTAATKYHLNGRDSLVNPGPAMASHKDDEEKFFPMHGTLIFGKQGTNANDADLENVMITDEEEIRTTNPVATEQYGTVSNNLQNSNTGPTTGTVNHQGALPGMVWQDRDVYLQGPIWAKIPHTDGHFHPSPLMGGFGLKHPPPQIMIKNTPVPANPPTNFSSAKFASFITQYSTGQVSVEIEWELQKENSKRWNPEIQYTSNYNKSVNVDFTVDTNGVYSEPRPIGTRYLTRNL

SEQ ID NO: 318 - DNA, 3158 bp, Artificial Sequence
  source: /note="Description of Artificial Sequence: Synthetic polynucleotide"
gattgaatttagcggccgcgaattcgcccttgctgcgtcaactggaccaatgagaactttcctttcaatgattgcgtcgacaagatggtgatctggtgggaggagggaaagatgaccgccaaggtcgtggagtcggccaaagccattctcggaggaagcaaggtgcgcgcggaccagaaatgcaagtcctcggcccagatagacccgactcccgtgattgtcacctccaacaccaacatgtgcgccgtgattgacgggaactcaacgaccttcgaacaccagcagccgttgcaagaccggatgttcaaatttgaactcacccgccgtctggatcatgactttgggaaggtcaccaagcaggaagtcaaagactttttccggtgggcaaaggatcacgtggttgaggtggagcatgaattctacgtcaaaaagggtggagctaagaaaagacccgcccccagtgacgcagatataagtgagcccaaacgggcgcgcgagtcagttgcgcagccatcgacgtcagacgcggaagcttcgatcaactacgcgggcaggtaccaaaacaaatgttctcgtcacgtgggcatgaatctgatgctgtttccctgcagacaatgcgagagaatgaatcagaattcaaatatctgcttcactcacggacagaaagactgtttagagtgctttcccgtgtcagaatctcaacccgtttctgtcgtcaaaaaggcgtatcagaaactttgctacattcatcatatcatgggaaaggtgccagacgcttgcactgcctgcgatctggtcaatgtggatttggatgactgcatctctgaacaataaatgatttaaatcaggtatggctgccgatggttatcttccagattggctcgaggacactctctctgaaggaataagacagtggtggaagctcaaacctggcccaccaccaccaaagcccgcagagcggcataaggacgacagcaggggtcttgtgcttcctgggtacaagtacctcggacccttcaacggactcgacaagggggagccggtcaacgaggcagacgccgcggccctcgagcacgacaaggcctacgaccggcagctcgacagcggagacaacccgtacctcaagtacaaccacgccgacgcggagtttcaggagcgccttaaagaagatacgtcttttgggggcaacctcggacgagcagtcttccaggcaaaaaagagggttcttgaacctctgggcctggttgaggaacctgttaaaacggctccgggaaaaaagaggccggtagagcactctcctgtggagccagactcctcctcgggaaccggaaaagcgggccagcagcctgcaagaaaaagattgaatttcggtcagactggagacgcagactccgtacctgacccccagcctctcggacagccaccagcagccccctctggtctgggatctactacaatggctacaggcagtggcgcaccaatggcagacaataacgagggtgccgatggagtgggtaattcctcgggaaattggcattgcgattcccaatggctgggcgacagagtcatcaccaccagcacccgcacctgggccctgcccacctacaacaaccacctctacaagcaaatctccagccaatcaggagcctcaaacgacaaccactactttggctacagcaccccctgggggtattttgacttcaacagattccactgccacttttcaccacgtgactggcaaagactcatcaacaacaactggggattccgacccaagagactcaacttcaagctctttaacattcaagtcaaagaggtcacgcagaatgacggtacgacgacgattgccaataaccttaccagcacggttcaggtgtttactgactcggagtaccagctcccgtacgtcctcggctcggcgcatcaaggatgcctcccgccgtttccagcggacgtcttcatggtcccacagtatggatacctcaccctgaacaacgggagtcaggcagtaggacgctcttcattttactgcctggagtactttccttctcagatgctgcgtaccggaaacaactttcaattcagctacacttttgaagacgtgcctttccacagcagctacgctcacagccagagtctggatcggctgatgaatcctctggtcgaccagtacctgtattatctgaacaagacacaaacaaatagtggaactcttcagcagtctcggctactgtttagccaagctggacccaccaacatgtctcttcaagctaaaaactggctgcctggaccttgctacagacagcagcgtctgtcaaagcaggcaaacgacaacaacaacagcaactttccctggactgcagctacaaagtatcatctaaatggccgggactcgttggttaatccaggaccagctatggccagtcacaaggatgacgaagaaaagtttttccccatgcatggaacccttatatttggtaaacaaggaacaaatgccaacgacgcggatttggaaaatgtcatgattacagatgaagaagaaatcaggaccaccaatcccgtggctacggagcagtacggaactgtatcaaataatttgcaaaactcaaacactggtccaactactggaactgtcaatcaccaaggagcgttacctggtatggtgtggcaggatcgagacgtgtacctgcagggacccatttgggccaagattcctcacaccgatggacactttcatccttctccactgatgggaggttttggactcaaacacccacctcctcaaatcatgatcaaaaacactcccgttccagccaatcctcccacaaacttcagttctgccaagtttgcttctttcatcacacagtattccacggggcaggtcagcgtggagatcgagtgggagctgcagaaggagaacagcaaacgctggaatcccgaaattcagtacacttccaactacaacaaatctgttaatgtggactttactgtggacactaatggtgtgtattcagagcctcgccccattggcaccagatacctgactcgtaatctgtaattgcttgttaatcaataaaccgtttaattcgtttcagttgaactttggtctctgcgaagggcgaattcgtttaaacctgcaggactagtccctttagtga

SEQ ID NO: 319 - protein, 735 aa, Artificial Sequence
  source: /note="Description of Artificial Sequence: Synthetic polypeptide"
MAADGYLPDWLEDTLSEGIRQWWKLKPGPPPPKPAERHKDDSRGLVLPGYKYLGPFNGLDKGEPVNEADAAALEHDKAYDRQLDSGDNPYLKYNHADAEFQERLKEDTSFGGNLGRAVFQAKKRVLEPLGLVEEPVKTAPGKKRPVEHPPVEPDSSSGTGKAGQQPARKRLNFGQTGDADSVPDPQPLGQPPAAPSGLGSTTMATGSGAPMADNNEGADGVGNSSGNWHCDSQWLGDRVITTSTRTWALPTYNNHLYKQISSQSGASNDNHYFGYSTPWGYFDFNRFHCHFSPRDWQRLINNNWGFRPKRLNFKLFNIQVKEVTQNDGTTTIANNLTSTVQVFTDSEYQLPYVLGSAHQGCLPPFPADVFMVPQYGYLTLNNGSQAVGRSSFYCLEYFPSQMLRTGNNFQFSYTFEDVPFHSSYAHSQSLDRLMNPLIDQYLYYLNKTQTNSGTLQQSRLLFSQAGPTNMSLQAKNRLPGPCYRQQRLSKQANDNNNSNFPWTAATKYHLNGRDSLVNPGPAMASHKDDEEKFFPMHGTLIFGKQGTNANDADLENVMITDEEEIRTTNPVATEQYGTVSNNLQNSNTGPTTGTVNHQGALPGMVWQDRDVYLQGPIWAKIPHTDGHFHPSPLVGGFGLKHPPPQIMIKNTPVPANPPTNFSSAKFASFITQYSTGQVSVEIEWELQKENSKRWNPEIQYTSNYNKSVNVDFTVDTNGVYSEPRPIGTRYLTRNL

SEQ ID NO: 320 - DNA, 3159 bp, Artificial Sequence
  source: /note="Description of Artificial Sequence: Synthetic polynucleotide"
gattgaatttagcggccgcgaattcgcccttgctgcgtcaactggaccaatgagaactttcctttcaatgattgcgtcgacaagatggtgatctggtgggaggagggaaagatgaccgccaaggtcgtggagtcggccaaagccattctcggaggaagcaaggtgcgcgtggaccagaaatgcaagtcctcggcccagatagacccgactcccgtgattgtcacctccaacaccgacatgtgcgccgtgattgacgggaactcaacgaccttcgaacaccagcagccgttgcaagaccggatgttcaaatttgaactcacccgccgtctggatcatgactttgggaaggtcaccaagcaggaagtcaaagactttttccggtgggcaaaggatcacgtggttgaggtggagcatgaattctacgtcaaaaagggtggagctaagaaaagacccgcccccagtgacgcagatataagtgagcccaaacgggcgcgcgagtcagttgcgcagccatcgacgtcagacgcggaagcttcgatcaactacgcggacaggtaccaaaacaaatgttctcgtcacgtgggcatgaatctgatgctgtttccctgcagacaatgcgagagaatgaatcagaattcaaatatctgcttcactcacggacagaaagactgtttagagtgctttcccgtgtcagaatctcaacccgtttctgtcgtcaaaaaggcgtatcagaaactttgctacattcatcatatcatgggaaaggtgccagacgcttgcactgcctgcgatctggtcaatgtggatttggatgactgcatctctgaacaataaatgatttaaatcaggtatggctgccgatggttatcttccagattggctcgaggacactctctctgaaggaataagacagtggtggaagctcaaacctggcccaccaccaccaaagcccgcagagcggcataaggacgacagcaggggtcttgtgcttcctgggtacaagtacctcggacccttcaacggactcgacaagggggagccggtcaacgaggcagacgccgcggccctcgagcacgacaaggcctacgaccggcagctcgacagcggagacaacccgtacctcaagtacaaccacgccgacgcggagtttcaggagcgccttaaagaagatacgtcttttgggggcaacctcggacgagcagtcttccaggcaaaaaagagggttcttgaacctctgggcctggttgaggaacctgttaaaacggctccgggaaaaaagaggccggtagagcaccctcctgtggagccagactcctcctcgggaaccggaaaagcgggccagcagcctgcaagaaaaagattgaatttcggtcagactggagacgcagactccgtacctgacccccagcctctcggacagccaccagcagccccctctggtctgggatctactacaatggctacaggcagtggcgcaccaatggcagacaataacgagggtgccgatggagtgggtaattcctcgggaaattggcattgcgattcccaatggctgggcgacagagtcatcaccaccagcacccgcacctgggccctgcccacctacaacaaccacctctacaagcaaatctccagccaatcaggagcctcaaacgacaaccactactttggctacagcaccccctgggggtattttgacttcaacagattccactgccacttttcaccacgtgactggcaaagactcatcaacaacaactggggattccgacccaagagactcaacttcaagctctttaacattcaagtcaaagaggtcacgcagaatgacggtacgacgacgattgccaataaccttaccagcacggttcaggtgtttactgactcggagtaccagctcccgtacgtcctcggctcggcgcatcaaggatgcctcccgccgtttccagcggacgtcttcatggtcccacagtatggatacctcaccctgaacaacgggagtcaggcagtaggacgctcttcattttactgcctggagtactttccttctcagatgctgcgtaccggaaacaactttcagttcagctacacttttgaagacgtgcctttccacagcagctacgctcacagccagagtctggatcggctgatgaatcctctgatcgaccagtacctgtattatctgaacaagacacaaacaaatagtggaactcttcagcagtctcggctactgtttagccaagctggacccaccaacatgtctcttcaagctaaaaaccggctgcctggaccttgctacagacagcagcgtctgtcaaagcaggcaaacgacaacaacaacagcaactttccctggaccgcagctacaaagtatcatctaaatggccgggactcgttggttaatccaggaccagctatggccagtcacaaggatgacgaagaaaagtttttccccatgcatggaacccttatatttggtaaacaaggaacaaatgccaacgacgcggatttggaaaatgtcatgattacagatgaagaagaaatcaggaccaccaatcccgtggctacggagcagtacggaactgtatcaaataatttgcaaaactcaaacactggtccaactactggaactgtcaatcaccaaggagcgttacctggtatggtgtggcaggatcgagacgtgtacctgcagggacccatttgggccaagattcctcacaccgatggacactttcatccttctccactggtgggaggttttggactcaaacacccacctcctcaaatcatgatcaaaaacactcccgttccagccaatcctcccacaaacttcagttctgccaagtttgcttctttcatcacacagtattccacggggcaggtcagcgtggagatcgagtgggagctgcagaaggagaacagcaaacgctggaatcccgaaattcagtacacttccaactacaacaaatctgttaatgtggactttactgtggacactaatggtgtgtattcagagcctcgccccattggcaccagatacctgactcgtaatctgtaattgcttgttaatcaataaaccgtttaattcgtttcagttgaactttggtctctgcgaagggcgaattcgtttaaacctgcaggactagtccctttagtgag

SEQ ID NO: 321 - DNA, 2208 bp, Artificial Sequence
  source: /note="Description of Artificial Sequence: Synthetic polynucleotide"
atggctgccgatggttatcttccagattggctcgaggacactctctctgaaggaataagacagtggtggaagctcaaacctggcccaccaccaccaaagcccgcagagcggcataaggacgacagcaggggtcttgtgcttcctgggtacaagtaccttggacccttcaacggactcgacaagggagagccggtcaacgaggcagacgccgcggccctcgagcacgacaaggcctacgaccggcagctcgacagcggagacaacccgtaccccaagtacaaccacgccgacgcggagttccaggagcgtcttaaagaagatacgtcttttgggggcaacctcggacgagcagtcttccaggcgaaaaagagggttcttgaacctctgggcctggttgaggaacctgttaagacggctccgggaaaaaagaggccggtagagcactctcctgcggagccagactcctcctcgggaaccggaaaagcgggccagcagcctgcaagaaagagattgaatttcggtcagactggagacgcagactccgtacctgacccccagcctctcggacagccaccagcagccccctctggtctgggaactaatacgatggctacaggcagtggcgcaccaatggcagacaataacgagggcgccgacggagtgggtaattcctcgggaaattggcattgcgattccacatggatgggcgacagagtcatcaccaccagcacccgcacctgggctctgcccacctacaacaaccacctctacaagcagatttccagccaatcaggagcctcaaacgacaaccactactttggctacagcaccccttgggggtattttgacttcaacagattccactgccacttttcgccacgtgactggcaaagactcatcaacaacaattggggattccggcccaaaagactcaacttcaagctctttaacattcaagtcaaggaggtcacgcagaatgacggtacgacgacgattgccaataaccttaccagcacggttcaggtgtttactgactcggagtaccagctcccgtacgtcctcggctcggcgcatcaaggatgcctcccgccgttcccagcagacgtcttcatggtgccacagtatggatacctcaccctgaacaacgggagtcaggcagtaggacgctcttcattttactgcctggagtactttccttctcagatgctgcgtaccggaaacaactttaccttcagctacacctttgaggacgttcctttccacagcagctacgcccacagccagagtttggaccgtctcatgaatcctctcatcgaccagtacctgtattacttgagcagaacaaacactccaagcggaaccaccacgcagtcaaggcttcagttttctcaggccggagcaagtgacattcgggaccagtctaggaactggcttcctggaccctgttaccgccagcagcgagtatcaaagacatctgcggataacaacaacagtgaatactcgtggactggagctaccaagtaccaccttaatggaagagactctctggtgaatccgggcccggccatggccagccacaaggacgatgaagaaaagttttttcctcagagcggggttctcatctttggaaaacaagactcgggaaaaactaatgtggacattgaaaaggtcatgattacagacgaagaggaaatcaggaccaccaatcccgtggctacggagcagtatggttctgtatctaccaacctccagagcggcaacacacaagcagctacctcagatgtcaacacacaaggcgttcttccaggcatggtgtggcaggacagagacgtgtacctgcaggggcccatctgggcaaagattccacacacggacggacattttcacccctctcccctcatgggcggattcggacttaaacaccctcccccgcagattctcatcaagaacaccccggtacctgcgaatccttcgactaccttcagtgcggcaaagtttgcttccttcattacacagtactccacggggcaggtcagcgtggagatcgagtgggagctgcagaaggagaacagcaaacgctggaatcccgagattcagtacacttccaactacaacaaatctgttaatgtggactttactgtggacactaatggtgtgtattcagagcctcgccccattggcaccaggtacctgactcgtaatctgtaa

SEQ ID NO: 322 - protein, 735 aa, Artificial Sequence
  source: /note="Description of Artificial Sequence: Synthetic polypeptide"
MAADGYLPDWLEDTLSEGIRQWWKLKPGPPPPKPAERHKDDSRGLVLPGYKYLGPFNGLDKGEPVNEADAAALEHDKAYDRQLDSGDNPYPKYNHADAEFQERLKEDTSFGGNLGRAVFQAKKRVLEPLGLVEEPVKTAPGKKRPVEHSPAEPDSSSGTGKAGQQPARKRLNFGQTGDADSVPDPQPLGQPPAAPSGLGTNTMATGSGAPMADNNEGADGVGNSSGNWHCDSTWMGDRVITTSTRTWALPTYNNHLYKQISSQSGASNDNHYFGYSTPWGYFDFNRFHCHFSPRDWQRLINNNWGFRPKRLNFKLFNIQVKEVTQNDGTTTIANNLTSTVQVFTDSEYQLPYVLGSAHQGCLPPFPADVFMVPQYGYLTLNNGSQAVGRSSFYCLEYFPSQMLRTGNNFTFSYTFEDVPFHSSYAHSQSLDRLMNPLIDQYLYYLSRTNTPSGTTTQSRLQFSQAGASDIRDQSRNWLPGPCYRQQRVSKTSADNNNSEYSWTGATKYHLNGRDSLVNPGPAMASHKDDEEKFFPQSGVLIFGKQDSGKTNVDIEKVMITDEEEIRTTNPVATEQYGSVSTNLQSGNTQAATSDVNTQGVLPGMVWQDRDVYLQGPIWAKIPHTDGHFHPSPLMGGFGLKHPPPQILIKNTPVPANPSTTFSAAKFASFITQYSTGQVSVEIEWELQKENSKRWNPEIQYTSNYNKSVNVDFTVDTNGVYSEPRPIGTRYLTRNL

SEQ ID NO: 323 - DNA, 2208 bp, Artificial Sequence
  source: /note="Description of Artificial Sequence: Synthetic polynucleotide"
atggctgccgatggttatcttccagattggctcgaggacactctctctgaaggaataagacagtggtggaagctcaaacctggcccaccaccaccaaagcccgcagagcggcataaggacgacagcaggggtcttgtgcttcctgggtacaagtaccttggacccttcaacggactcgacaagggagagccggtcaacgaggcagacgccgcggccctcgagcacgacaaggcctacgaccggcagctcgacggcggagacaacccgtacctcaagtacaaccacgccgacgcggagttccaggagcgtcttaaagaagatacgtcttttgggggcaacctcggacgagcagtcttccaggcgaaaaagagggttcttgaacctctgggcctggttgaggaacctgttaagacggctccgggaaaaaagaggccggtagagcactctcttgcggagccagactcctcctcgggaaccggaaaagcgggccagcagcctgcaagaaggagattgaatttcggtcagactggagacgcagactccgtacctgacccccagcctctcggacagccaccagcagccccctctggtctgggaactaatacgatggctacaggcagtggcgcaccaatggcagacaataacgagggcgccgacggagtgggtaattcctcgggaaattggcattgcgattccacatggatgggcgacagagtcatcaccaccagcacccgcacctgggctctgcccacctacaacaaccacctctacaggcagatttccagccaatcaggagcctcaaacgacaaccactactttggctacagcaccccttgggggtattttgacttcaacagattccactgccacttttcgccacgtgactggcaaagactcatcaacaacaattggggatcccggcccaaaagactcaacttcaagctctttaacattcaagtcaaggaggtcacgcagaatgacggtacgacgacgattgccaataaccttaccagcacggttcaggtgtttactgactcggagtaccagctcccgtacgtcctcggctcggcgcatcaaggatgcctcccgccgttcccagcagacgtcttcatggtgccacagtatggatacctcaccctgaacaacgggagtcaggcagtaggacgctcttcattttactgcctggagtactttccttctcagatgctgcgtaccggaaacaactttaccttcagctacacctttgaggacgttcctttccacagcagctacgcccacagccagagtttggaccgtctcatgaatcctctcgtcgaccagtacctgtattacttgagcagaacaaacactccaagcggaaccaccacgcagtcaaggcttcagttttctcaggccggagcaagtgacattcgggaccagtctaggaactggcttcctggaccctgttaccgccagcagcgagtatcaaagacatctgcggataacaacaacagtgaatactcgtggactggagctaccaagtaccaccttaatggaagagactctctggtgaatccgggcccggccatggccagccacaaggacgatgaagaaaagttttttcctcagagcggggttctcatctttggaaaacaagactcgggaaaaactaatgtggacattgaaaaggtcatgattacagacgaagaggaaatcaggaccaccaatcccgtggctacggagcagtatggttctgtatctaccaacctccagagcggcaacacacaagcagctacctcagatgtcaacacacaaggcgttcttccaggcatggtgtggcaggacagagacgtgtacctgcaggggcccatctgggcaaagattccacacacggacggacattttcacccctctcccctcatgggcggattcggacttaaacaccctcccccgcagattctcatcaagaacaccccggtacctgcgaatccttcgactaccttcagtgcggcaaagtttgcttccttcattacacagtactccacggggcaggtcagcgtggagatcgagtgggagctgcagaaggagaacagcaaacgctggaatcccgagattcagtacacttccaactacaacaaatctgttaatgtggactttactgtggacactaatggtgtgtattcagagcctcgccccattggcaccagatacctgactcgtaatctgtaa

SEQ ID NO: 324 - protein, 735 aa, Artificial Sequence
  source: /note="Description of Artificial Sequence: Synthetic polypeptide"
MAADGYLPDWLEDTLSEGIRQWWKLKPGPPPPKPAERHKDDSRGLVLPGYKYLGPFNGLDKGEPVNEADAAALEHDKAYDRQLDGGDNPYLKYNHADAEFQERLKEDTSFGGNLGRAVFQAKKRVLEPLGLVEEPVKTAPGKKRPVEHSLAEPDSSSGTGKAGQQPARRRLNFGQTGDADSVPDPQPLGQPPAAPSGLGTNTMATGSGAPMADNNEGADGVGNSSGNWHCDSTWMGDRVITTSTRTWALPTYNNHLYRQISSQSGASNDNHYFGYSTPWGYFDFNRFHCHFSPRDWQRLINNNWGSRPKRLNFKLFNIQVKEVTQNDGTTTIANNLTSTVQVFTDSEYQLPYVLGSAHQGCLPPFPADVFMVPQYGYLTLNNGSQAVGRSSFYCLEYFPSQMLRTGNNFTFSYTFEDVPFHSSYAHSQSLDRLMNPLVDQYLYYLSRTNTPSGTTTQSRLQFSQAGASDIRDQSRNWLPGPCYRQQRVSKTSADNNNSEYSWTGATKYHLNGRDSLVNPGPAMASHKDDEEKFFPQSGVLIFGKQDSGKTNVDIEKVMITDEEEIRTTNPVATEQYGSVSTNLQSGNTQAATSDVNTQGVLPGMVWQDRDVYLQGPIWAKIPHTDGHFHPSPLMGGFGLKHPPPQILIKNTPVPANPSTTFSAAKFASFITQYSTGQVSVEIEWELQKENSKRWNPEIQYTSNYNKSVNVDFTVDTNGVYSEPRPIGTRYLTRNL

SEQ ID NO: 325 - protein, 738 aa, Artificial Sequence
  source: /note="Description of Artificial Sequence: Synthetic polypeptide"
MAADGYLPDWLEDNLSEGIREWWDLKPGAPKPKANQQKQDDGRGLVLPGYKYLGPFNGLDKGEPVNAADAAALEHDKAYDQQLKAGDNPYLRYNHADAEFQERLQEDTSFGGNLGRAVFQAKKRVLEPLGLVEEAAKTAPGKKRPVEPSPQRSPDSSAGIGKKGQQPAKKRLNFGQTGDSESVPDPQPIGEPPAGPSGLGSGTMAAGGGAPMADNNEGADGVGSSSGNWHCDSTWLGDRVITTSTRTWALPTYNNHLYKQISNGTSGGSTNDNTYFGYSTPWGYFDFNRFHCHFSPRDWQRLINNNWGFRPKRLSFKLFNIQVKEVTQNEGTETIANNLTSTIQVFTDSEYQLPYVLGSAHQGCLPPFPADVFMIPQYGYLTLNNGSQAVGRSSFYCLEYFPSQMLRTGNNFEFSYTFEDVPFHSSCAHSQSSDRLMNPLIDQYLYYLSRTRSTGGTQGTQQLLFSQAGPANMSAQAKNWLPGPCYRQQRVSTTLSQNNNSNFAWTGATKYHLNGRDSLVNPGVAMATHKDDEERFFPSSGVLMFGKQGAGRDNVDYSSVMLTSEEEIKTTNPVATEQYGVVADNLQQTNTGPIVGNVNSQGALPGMVWQNRDVYLQGPIWAKIPHTDGNFHPSPLMGGFGLKHPPPQILIKNTPVPADPPTTFSQAKLASFITQYSTGQVSVEIEWELQKENSKRWNPEIQYTSNYYKSTNVDFAVNTEGTYSEPRPIGTRYLTRNL

SEQ ID NO: 326 - DNA, 2217 bp, Artificial Sequence
  source: /note="Description of Artificial Sequence: Synthetic polynucleotide"
atggctgctgacggttatcttccagattggctcgaggacaacctctctgagggcattcgcgagtggtgggacctgaaacctggagcccccaagcccaaggccaaccagcagaagcaggacgacggccggggtctggtgcttcttggctacaagtacctcggacccttcaacggactcgacaagggggagcccgtcaatgcggcggacgcagcggccctcgagcacgacaaggcctacgaccagcagctcaaagcgggtgacaatccgtacctgcggtataaccacgccgacgccgagtttcaggagcgtctgcaagaagatacgtcttttgggggcaacctcgggcgagcagtcttccaggccaagaagcgggttctcgaacctctcggtctggttgaggaagctgctaagacggctcctggaaagaagagaccggtagaaccgtcacctcagcgttcccccgactcctccacgggcatcggcaagaaaggccagcagcccgctaaaaagagactgaactttggtcagactggcgactcagagtcagtccccgaccctcaaccaatcggagaaccaccagcaggcccctctggtctgggatctggtacaatggctgcaggcggtggcgctccaatggcagacaataacgaaggcgccgacggagtgggtagttcctcaggaaattggcattgcgattccacatggctgggcgacagagtcatcaccaccagcacccgaacctgggccctgcccacctacaacaaccacctctacaagcaaatatccaatgggacatcgggaggaagcaccaacgacaacacctacttcggctacagcaccccctgggggtattttgacttcaacagattccactgccacttctcaccacgtgactggcagcgactcatcaacaacaactggggattccggccaaaaagactcagcttcaagctcttcaacatccaggtcaaggaggtcacgcagaatgaaggcaccaagaccatcgccaataaccttaccagcacgattcaggtatttacggactcggaataccagctgccgtacgtcctcggctccgcgcaccagggctgcctgcctccgttcccggcggacgtcttcatgattccccagtacggctaccttacactgaacaatggaagtcaagccgtaggccgttcctccttctactgcctggaatattttccatctcaaatgctgcgaactggaaacaattttgaattcagctacaccttcgaggacgtgcctttccacagcggctacgcacacagccagagcttggaccgactgatgaatcctctcatcgaccagtacctgtactacttatccagaactcagtccacaggaggaactcaaggtacccagcaattgttattttctcaagctgggcctgcaaacatgtcggctcaggctaagaactggctacctggaccttgctaccggcagcagcgagtctctacgacactgtcgcaaaacaacaacagcaactttgcttggactggtgccaccaaatatcacctgaacggaagagactctttggtaaatcccggtgtcgccatggcaacccacaaggacgacgaggaacgcttcttcccgtcgagtggagtcctgatgtttggaaaacagggtgctggaagagacaatgtggactacagcagcgttatgctaaccagcgaagaagaaattaaaaccactaaccctgtagccacagaacaatacggtgtggtggctgacaacttgcagcaaaccaatacagggcctattgtgggaaatgtcaacagccaaggagccttacctggcatggtctggcagaaccgagacgtgtacctgcagggtcccatctgggccaagattcctcacacggacggcaacttccacccttcaccgctaatgggaggatttggactgaagcacccacctcctcagatcctgatcaagaacacgccggtacctgcggatcctccaacgacgttcagccaggcgaaattggcttccttcattacgcagtacagcaccggacaggtcagcgtggaaatcgagtgggagctgcagaaggagaacagcaaacgctggaacccagagattcagtacacttcaaactactacaaatctacaaatgtggactttgctgtcaatacagagggaacttattctgagcctcgccccattggtactcgttacctcacccgtaatctgtaa

SEQ ID NO: 327 - protein, 738 aa, Artificial Sequence
  source: /note="Description of Artificial Sequence: Synthetic polypeptide"
MAADGYLPDWLEDNLSEGIREWWDLKPGAPKPKANQQKQDDGRGLVLLGYKYLGPFNGLDKGEPVNAADAAALEHDKAYDQQLKAGDNPYLRYNHADAEFQERLQEDTSFGGNLGRAVFQAKKRVLEPLGLVEEAAKTAPGKKRPVEPSPQRSPDSSTGIGKKGQQPAKKRLNFGQTGDSESVPDPQPIGEPPAGPSGLGSGTMAAGGGAPMADNNEGADGVGSSSGNWHCDSTWLGDRVITTSTRTWALPTYNNHLYKQISNGTSGGSTNDNTYFGYSTPWGYFDFNRFHCHFSPRDWQRLINNNWGFRPKRLSFKLFNIQVKEVTQNEGTKTIANNLTSTIQVFTDSEYQLPYVLGSAHQGCLPPFPADVFMIPQYGYLTLNNGSQAVGRSSFYCLEYFPSQMLRTGNNFEFSYTFEDVPFHSGYAHSQSLDRLMNPLIDQYLYYLSRTQSTGGTQGTQQLLFSQAGPANMSAQAKNWLPGPCYRQQRVSTTLSQNNNSNFAWTGATKYHLNGRDSLVNPGVAMATHKDDEERFFPSSGVLMFGKQGAGRDNVDYSSVMLTSEEEIKTTNPVATEQYGVVADNLQQTNTGPIVGNVNSQGALPGMVWQNRDVYLQGPIWAKIPHTDGNFHPSPLMGGFGLKHPPPQILIKNTPVPADPPTTFSQAKLASFITQYSTGQVSVEIEWELQKENSKRWNPEIQYTSNYYKSTNVDFAVNTEGTYSEPRPIGTRYLTRNL

SEQ ID NO: 328 - protein, 735 aa, Artificial Sequence
  source: /note="Description of Artificial Sequence: Synthetic polypeptide"
MAADGYLPDWLEDTLSEGIRQWWKLKPGPPPPKPAERHKDDSRGLVLPGYKYLGPFNGLDKGEPVNEADAAALEHDKAYDRQLDSGDNPYLKYNHADAEFQERLKEDTSFGGNLGRAVFQAKKRVLEPLGLVEPPVKTAPGKKRPVEHSPAEPDSSSGTGKAGQQPARKRLNFGQTGDADSVPDPQPLGQPPAAPSGLGSTTMATGSGAPMADNNEGADGVGNSSGNWHCDSQWLGDRVITTSTRTWALPTYNNHLYKQISSQSGASNDNHYFGYSTPWGYFDFNRFHCHFSPRDWQRLINNNWGFRPKRLNFKLFNIQVKEVTQNDGTTTIANNLTSTVQVFTDSEYQLPYVLGSAHQGCLPPFPADVFMVPQYGYLTLNNGSQAVGRSSFYCLEYFPSQMLRTGNNFQFSYTFEDVPFHSSYAHSQSLDRLMNPLIDQYLYYLNKTQSNSGTLQQSRLLFSQAGPTSMSLQAKNWLPGPCYRQQRLSKQANDNNNSNFPWTAATKYHLNGRDSLVNPGPAMASHKDDEEKFFPMHGTLIFGKQGTNANDADLDNVMITDEEEIRTTNPVATEQYGYVSNNLQNSNTGPTTGTVNHQGALPGMVWQDRDVYLQGPIWAKIPHTDGHFHPSPLMGGFGLKHPPPQIMIKNTPVPANPPTNFSSAKFASFITQYSTGQVSVEIEWELQKENSKRWNPEIQYTSNYNKSVNVDFTVDTNGVYSEPRPIGTRYLTRNL

SEQ ID NO: 329 - protein, 735 aa, Artificial Sequence
  source: /note="Description of Artificial Sequence: Synthetic polypeptide"
MAADGYLPDWLEDTLSEGIRQWWKLKPGPPPPKPAERHKDDSRGLVLPGYKYLGPFNGLDKGEPVNEADAAALEHDKAYDRQLDSGDNPYLKYNHADAEFQERLKEDTSFGGNLGRAVFQAKKRVLEPLGLVEGPVKTAPGKKRPVEHSPAEPDSSSGTGKAGQQPARKRLNFGQTGDADSVPDPQPLGQPPAAPSGLGSTTMATGSGAPMADNNEGADGVGNSSGNWHCDSQWLGDRVITTSTRTWALPTYNNHLYKQISSQSGASNDNHYFGYSTPWGYFDFNRFHCHFSPRDWQRLINNNWGFRPKRLNFKLFNIQVKEVTQNDGTTTIANNLTSTVQVFTDSEYQLPYVLGSAHQGCLPPFPADVFMVPQYGYLTLNNGSQAVGRSSFYCLEYFPSQMLRTGNNFQFSYTFEDVPFHSSYAHSQSLDRLMNPLIDQYLYYLNKTQSNSGTLQQSRLLFSQAGPTSMSLQAKNWLPGPCYRQQRLSKQANDNNNSNFPWTAATKYHLNGRDSLVNPGPAMASHKDDEEKFFPMHGTLIFGKQGTNANDADLDNVMITDEEEIRTTNPVATEQYGYVSNNLQNSNTGPTTGTVNHQGALPGMVWQDRDVYLQGPIWAKIPHTDGHFHPSPLMGGFGLKHPPPQIMIKNTPVPANPPTNFSSAKFASFITQYSTGQVSVEIEWELQKENSKRWNPEIQYTSNYNKSVNVDFTVDTNGVYSEPRPIGTRYLTRNL

SEQ ID NO: 330 - DNA, 2208 bp, Artificial Sequence
  source: /note="Description of Artificial Sequence: Synthetic polynucleotide"
atggctgccgatggttatcttccagattggctcgaggacactctctctgaaggaataagacagtggtggaagctcaaacctggcccaccaccaccaaagcccgcagagcggcataaggacgacagcaggggtcttgtgcttcctgggtacaagtacctcggacccttcaacggactcgacaagggggagccggtcaacgaggcagacgccgcggccctcgagcacgacaaggcctacgaccggcagctcgacagcggagacaacccgtacctcaagtacaaccacgccgacgcggagtttcaggagcgtcttaaagaagatacgtcttttgggggcaacctcggacgagcagtcttccaggcgaaaaagagggttcttgaacctctgggcctggttgagggacctgttaagacggctccgggaaaaaagaggccggtagagcactctcctgcggagccagactcctcctcgggaaccggaaaagcgggccagcagcctgcaagaaaaagattgaattttggtcagactggagacgcagactccgtacctgacccccagcctctcggacagccaccagcagccccctctggtttgggatctactacaatggctacaggcagtggcgcaccaatggcagacaataacgagggtgccgatggagtgggtaattcctcaggaaattggcattgcgattcccaatggctgggcgacagagtcatcaccaccagcacccgaacctgggccctgcccacctacaacaaccacctctacaagcaaatctcaagccaatcaggagcctcaaacgacaaccactactttggctacagcaccccttgggggtattttgacttcaacagattccactgccacttttcaccacgtgactggcaaagactcatcaacaacaactggggattccgacccaagagactcaacttcaagctctttaacattcaagtcaaagaggtcacgcagaatgacggtacgacgacgattgccaataaccttaccagcacggttcaggtgtttactgactcggagtaccagctcccgtacgtcctcgggtcggcgcatcaaggatgcctcccgccgtttccagcggacgtcttcatggtcccacagtatggatacctcaccctgaacaacgggagtcaggcggtaggacgctcttccttttactgcctggagtactttccttctcagatgcttcgtactggaaacaactttcagttcagctacacctttgaagacgttcctttccacagcagctacgctcacagccagagtctggatcggctgatgaatcctctgatcgaccagtacctgtattatctgaacaaaacacaatcaaatagtggaactcttcagcagtctcggctactgtttagtcaagctggacccaccagcatgtctcttcaagctaaaaactggctacctggaccttgctacagacagcagcgtctgtcaaagcaggcaaacgacaacaacaacagcaactttccctggactgcggctacaaagtatcacctaaatggccgggactcgttggttaatccaggaccagctatggccagtcacaaagacgatgaagaaaagtttttccccatgcatggaaccctgatatttggtaaacaaggaacaaatgctaacgacgcggatttggacaatgtcatgattacagatgaagaagaaatccgcaccaccaatcccgtggctacggagcagtacggatatgtgtcaaataatttgcaaaactcaaatactggtccaactactggaactgtcaatcaccaaggagcgttacctggcatggtgtggcaggatcgagacgtgtacctgcagggacccatttgggccaagattcctcacaccgatggacactttcatccttctccactgatgggaggttttgggctcaaacacccgcctcctcagatcatgatcaaaaacactcccgttccagccaatcctcccacaaacttcagttctgccaagtttgcttctttcatcacacagtattccacggggcaggtcagcgtggagatcgagtgggagctgcagaaagagaacagcaaacgctggaatcccgaaattcagtacacttccaactacaacaaatctgttaatgtggactttactgtggacactaatggcgtgtattcagagcctcgccccattggcaccagatacctgactcgtaatctgtaa

SEQ ID NO: 331 - DNA, 2211 bp, Artificial Sequence; identical to SEQ ID NO: 12
  source: /note="Description of Artificial Sequence: Synthetic polynucleotide"

SEQ ID NO: 332 - DNA, 2208 bp, Artificial Sequence
  source: /note="Description of Artificial Sequence: Synthetic polynucleotide"
atggctgccgatggttatcttccagattggctcgaggacactctctctgaaggaacaagacagtggtggaagctcaaacctggcccaccaccaccaaagcccgcagagcggcataaggacgacagcaggggtcttgtgcttcctgggtacaagtacctcggacccttcaacggactcgacaagggggagccggtcaacgaggcagacgccgcggccctcgagcacgacaaggcctacgaccggcagctcgacagcggagacaacccgtacctcaagtacaaccacgccgacgcggagtttcaggagcgtcttaaagaagatacgtcttttgggggcaacctcggacgagcagtcttccaggcgaaaaagagggttcttgaacctctgggcctggttgaggaacctgttaagacggctccgggaaaaaagaggccggtagagcactctcctgcggagccagactcctcctcgggaaccggaaaagcgggccagcagcctgcaagaaaaagattgaattttggtcagactggagacgcagactccgtacctgacccccagcctctcggacagccaccagcagccccctctggtttgggatctactacaatggctacaggcagtggcgcaccaatggcagacaataacgagggtgccgatggagtgggtaattcctcaggaaattggcattgcgattcccaatggctgggcgacagagtcatcaccaccagcacccgaacctgggccctgcccacctacaacaaccacctctacaagcaaatctcaagccaatcaggagcctcaaacgacaaccactactttggctacagcaccccttgggggtattttgacttcaacagattccactgccacttttcaccacgtgactggcaaagactcatcaacaacaactggggattccgacccaagagactcaacttcaagctctttaacattcaagtcaaagaggtcacgcagaatgacggtacgacgacgattgccaataaccttaccagcacggttcaggtgtttactgactcggagtaccagctcccgtacgtcctcgggtcggcgcatcaaggatgcctcccgccgtttccagcggacgtcttcatggtcccacagtatggatacctcaccctgaacaacgggagtcaggcggtaggacgctcttccttttactgcctggagtactttccttctcagatgcttcgtactggaaacaactttcagttcagctacacctttgaagacgttcctttccacagcagctacgctcacagccagagtctggatcggctgatgaatcctctgatcgaccagtacctgtattatctgaacaaaacacaatcaaatagtggaactcttcagcagtctcggctactgtttagtcaagctggacccaccagcatgtctcttcaagctaaaaactggctacctggaccttgctacagacagcagcgtctgtcaaagcaggcaaacgacaacaacaacagcaactttccctggactgcggctacaaagtaccacctaaatggccgggactcgttggttaatccaggaccagctatggccagtcacaaagacgatgaagaaaagtttttccccatgcatggaaccctgatatttggtaaacaaggaacaaatgctaacgacgcggatttggacaatgtcatgattacagatgaagaagaaatccgcaccaccaatcccgtggctacggagcagtacggatatgtgtcaaataatttgcaaaactcaaatactggtccaactactggaactgtcaatcaccaaggagcgttacctggcatggtgtggcaggatcgagacgtgtacctgcagggacccatttgggccaagattcctcacaccgatggacactttcatccttctccactgatgggaggttttgggctcaaacacccgcctcctcagatcatgatcaaaaacactcccgttccagccaatcctcccacaaacttcagttctgccaagtttgcttctttcatcacacagtattccacggggcaggtcagcgtggagatcgagtgggagctgcagaaagagaacagcaaacgctggaatcccgaaattcagtacacttccaactacaacaaatctgttaatgtggactttactgtggacactaatggcgtgtattcagagcctcgccccattggcaccagatacctgactcgtaatctgtaa

SEQ ID NO: 333 - DNA, 2217 bp, Artificial Sequence
  source: /note="Description of Artificial Sequence: Synthetic polynucleotide"
atggctgctgacggttatcttccagattggctcgaggacaacctctctgagggcattcgcgagtggtgggacctgaaacctggagcccccaagcccaaggccaaccagcagaagcaggacgacggccggggtctggtgcttcctggctacaagtacctcggacccttcaacggactcgacaagggggagcccgtcaacgcggcggacgcagcggccctcgagcacgacaaggcctacgaccagcagctcaaagcgggtgacaatccgtacctgcggtataaccacgccgacgccgagtttcaggagcgtctgcaagaagatacgtcttttgggggcaacctcgggcgagcagtcttccaggccaagaagcgggttctcgaacctctcggtctggttgaggaagctgctaagacggctcctggaaagaagagaccggtagaaccgtcacctcagcgttcccccgactcctccacgggcatcggcaagaaaggccagcagcccgctaaaaagagactgaactttggtcagactggcgactcagagtcagtccccgaccctcaaccaatcggagaaccacctgcaggcccctctggtctgggatctggtacaatggctgcaggcggtggcgctccaatggcagacaataacgaaggcgccgacggagtgggtagttcctcaggaaattggcattgcgattccacatggctgggcgacagagtcatcaccaccagcacccgaacctgggccctgcccacctacaacaaccacctctacaagcaaatatccaatgggacatcgggagggagcaccaacgacaacacctacttcggctacagcaccccctgggggtattttgacttcaacagattccactgccacttctcaccacgtgactggcagcgactcatcaacaacaactggggattccggccaaaaagactcagcttcaagctcttcaacatccaggtcaaggaggtcacgcagaatgaaggcaccaagaccatcgccaataaccttaccagcacgattcaggtatttacggactcggaataccagctgccgtacgtcctcggctccgcgcaccagggctgcctgcctccgttcccggcggacgtcttcatgattccccagtacggctaccttacactgaacaatggaagtcaagccgtaggccgttcctccttctactgcctggaatattttccatctcaaatgctgcgaactggaaacaattttgaattcagctacaccttcgaggacgtgcctttccacagcagctacgcacacagccagagcttggaccgactgatgaatcctctcatcgaccagtacctgtactacttatccagaactcagtccacaggaggaactcaaggtacccagcaattgttattttctcaagctgggcctgcaaacatgtcggctcaggctaagaactggctacctggaccttgctaccggcagcagcgagtctctacgacactgtcgcaaaacaacaacagcaactttgcttggactggtgccaccaaatatcacctgaacggaagagactctttggtaaatcccggtgtcgccatggcaacccacaaggacgacgaggaacgcttcttcccgtcgagtggagtcctgatgtttggaaaacagggtgctggaagagacaatgtggactacagcagcgttatgctaaccagcgaagaagaaattaaaaccactaaccctgtagccacagaacaatacggtgtggtggctgacaacttgcagcaaaccaatacagggcctattgtgggaaatgtcaacagccaaggagccttacctggcatggtctggcagaaccgagacgtgtacctgcagggtcccatctgggccaagattcctcacacggacggcaactgccacccttcaccgctaatgggaggatttggactgaagcacccacctcctcagatcctgatcaagaacacgccggtacctgcggatcctccaacaacgttcagccaggcgaaattggcttccttcattacgcagtacagcaccggacaggtcagcgtggaaatcgagtgggagctgcagaaggagaacagcaaacgctggaacccagagattcagtacacttcaaactactacaaatctacaaatgtggactttgctgtcaatacagagggaacttattctgagcctcgccccattggtactcgttacctcacccgtaatctgtaa

SEQ ID NO: 334 - protein, 735 aa, Artificial Sequence
  source: /note="Description of Artificial Sequence: Synthetic polypeptide"
MAADGYLPDWLEDTLSEGTRQWWKLKPGPPPPKPAERHKDDSRGLVLPGYKYLGPFNGLDKGEPVNEADAAALEHDKAYDRQLDSGDNPYLKYNHADAEFQERLKEDTSFGGNLGRAVFQAKKRVLEPLGLVEEPVKTAPGKKRPVEHSPAEPDSSSGTGKAGQQPARKRLNFGQTGDADSVPDPQPLGQPPAAPSGLGSTTMATGSGAPMADNNEGADGVGNSSGNWHCDSQWLGDRVITTSTRTWALPTYNNHLYKQISSQSGASNDNHYFGYSTPWGYFDFNRFHCHFSPRDWQRLINNNWGFRPKRLNFKLFNIQVKEVTQNDGTTTIANNLTSTVQVFTDSEYQLPYVLGSAHQGCLPPFPADVFMVPQYGYLTLNNGSQAVGRSSFYCLEYFPSQMLRTGNNFQFSYTFEDVPFHSSYAHSQSLDRLMNPLIDQYLYYLNKTQSNSGTLQQSRLLFSQAGPTSMSLQAKNWLPGPCYRQQRLSKQANDNNNSNFPWTAATKYHLNGRDSLVNPGPAMASHKDDEEKFFPMHGTLIFGKQGTNANDADLDNVMITDEEEIRTTNPVATEQYGYVSNNLQNSNTGPTTGTVNHQGALPGMVWQDRDVYLQGPIWAKIPHTDGHFHPSPLMGGFGLKHPPPQIMIKNTPVPANPPTNFSSAKFASFITQYSTGQVSVEIEWELQKENSKRWNPEIQYTSNYNKSVNVDFTVDTNGVYSEPRPIGTRYLTRNL

SEQ ID NO: 335 - DNA, 2208 bp, Artificial Sequence
  source: /note="Description of Artificial Sequence: Synthetic polynucleotide"
atggctgccgatggttatcttccagattggctcgaggacactctctctgaaggaataagacagtggtggaagctcaaacctggcccaccaccaccaaagcccgcagagcggcatcaggacaacagcaggggtcttgtgcttcctgggtacaagtacctcggaccctccaacggactcgacaaaggagagccggtcaacgaggcagacgccgcggccctcgagcacgacaaggcctacgaccggcagctcgacagcggagacaacccgtacctcaagtacaaccacgccgacgcggagtttcaggagcgtcttaaagaagatacgtcttttgggggcaacctcggacgagcagtcttccaggcgaaaaagagggttcttgaacctctgggcctggttgaggaacctgttaagacggctccgggaaaaaagaggccggtagagcactctcctgtggagccagactcctcctcgggaaccggaaaagcgggccatcagcctgcgagaaagagattgaattttggtcagactggagacgcagactccgtacctgacccccagcctctcggacagccaccagcagcccccacaagtttgggatctactacaatggctacaggcagtggcgcaccaatggcagacaataacgagggtgccgatggagtgggtaattcctcaggaaattggcattgcgattcccaatggctgggcgacagagtcatcaccaccagcacccgaacctgggccctgcccacctacaacaaccacctctacaagcaaatctccagccaatcaggagcctcgaacgacaaccactactttggctgcagcaccccctgggggtattttgacttcaacagattccactgtcacttctccccacgtgattggcaaagactcatcaacaacaactggggattccgacccaagagactcaacttcaagctctttaacattcaagtcaaagaggtcacgcagaatgacggtacgacgacgattgccaataaccttaccagcacggttcaggtgtttactgactcggagtacccgctcccgtacgtcctcggctcggcgcatcaaggatgcctcccgccgtttccagcggacgtcttcatggtcccacagtatggatacctcaccctgaacaacgggagtcaggcggtaggacgctcttccttttactgcctggagtactttccttctcagatgctgcgtaccggaaacaactttaccttcagctacacctttgaggacgttcctttccacagcagctacgctcacagccagagtttggaccggctgatgaatcctctgatcgaccagtatctatattatctgaacaggacacaatcaaatagtggaactcttcagcagtctaggctactgtttagccaagctggacccaccagcatgtctcttcaagctaaaaactggctgcctggaccttgctacagacagcagcgtctttcaaagcaggcaaacgacaacaacaacagcaactttccctggactgcggctacaaagtatcatctaaatggccgggactcgttggttaatccaggaccagctatggccagccacaaagacgatgaagaaaagtttttccccatgcatggaaccctgatatttggtaaacaaggaacaaatgctaacgacgcggatttggagcatgttatgattacagatgaagaagaaatcaggaccaccaatcctgtggctacagagcagtacggaaacgtgtcaaataatttgcaaaactcaaatactggtccaactacagaaaatgtcaatcaccagggagcgttacctggtatggtgtggcaggatcgagacgtgtacctgcagggacccatttgggccaagattcctcacaccgacggacactttcacccttctccactgatgggaggttttggactcaaacacccgcctcctcaaatcatgatcaaaaacactcccgttccagccaatcctcccacaaacttcagttctgccaagtttgcttctttcatcacacagtattccacgggccaggtcagcgtggagattgagtgggagctgcagaaggagaacagcaaacgctggaaccccgagatccagtatacttccaactacaacaaatctgttaatgtggactttactgtggacactaatggtgtgtattcagagccttgccccattggcaccagatacctgactcgtaatctgtaa

SEQ ID NO: 336 - protein, 735 aa, Artificial Sequence
  source: /note="Description of Artificial Sequence: Synthetic polypeptide"
MAADGYLPDWLEDTLSEGIRQWWKLKPGPPPPKPAERHQDNSRGLVLPGYKYLGPSNGLDKGEPVNEADAAALEHDKAYDRQLDSGDNPYLKYNHADAEFQERLKEDTSFGGNLGRAVFQAKKRVLEPLGLVEEPVKTAPGKKRPVEHSPVEPDSSSGTGKAGHQPARKRLNFGQTGDADSVPDPQPLGQPPAAPTSLGSTTMATGSGAPMADNNEGADGVGNSSGNWHCDSQWLGDRVITTSTRTWALPTYNNHLYKQISSQSGASNDNHYFGCSTPWGYFDFNRFHCHFSPRDWQRLINNNWGFRPKRLNFKLFNIQVKEVTQNDGTTTIANNLTSTVQVFTDSEYPLPYVLGSAHQGCLPPFPADVFMVPQYGYLTLNNGSQAVGRSSFYCLEYFPSQMLRTGNNFTFSYTFEDVPFHSSYAHSQSLDRLMNPLIDQYLYYLNRTQSNSGTLQQSRLLFSQAGPTSMSLQAKNWLPGPCYRQQRLSKQANDNNNSNFPWTAATKYHLNGRDSLVNPGPAMASHKDDEEKFFPMHGTLIFGKQGTNANDADLEHVMITDEEEIRTTNPVATEQYGNVSNNLQNSNTGPTTENVNHQGALPGMVWQDRDVYLQGPIWAKIPHTDGHFHPSPLMGGFGLKHPPPQIMIKNTPVPANPPTNFSSAKFASFITQYSTGQVSVEIEWELQKENSKRWNPEIQYTSNYNKSVNVDFTVDTNGVYSEPCPIGTRYLTRNL

SEQ ID NO: 337 - DNA, 2214 bp, Artificial Sequence
  source: /note="Description of Artificial Sequence: Synthetic polynucleotide"
atggctgccgatggttatcttccagattggctcgaggacaaccttagtgaaggaattcgcgagtggtgggctttgaaacctggagcccctcaacccaaggcaaatcaacaacatcaagacaacgctcgaggtcttgtgcttccgggttacaaataccttggacccggcaacggactcgacaagggggagccggtcaacgcagcagacgcggcggccctcgagcacgacaaggcctacgaccagcagctgcaggcgggtgacaatccgtacctgcggtataaccacgccgacgccgagtttcaggagcgtctgcaagaagatacgtcttttgggggcaaccttggcagagcagtcttccaggccaaaaagaggatccttgagcctcttggtctggttgaggaagcagctaaaacggctcctggaaagaagaggcctgtagatcagtctcctcaggaaccggactcatcatctggtgttggcaaatcgggcaaacagcctgccagaaaaagactaaatttcggtcagactggcgactcagagtcagtcccagaccctcaacctctcggagaaccaccagcagcccccacaagtttgggatctaatacaatggcttcaggcggtggcgcaccaatggcagacaataacgagggtgccgatggggtgggtagttcctcgggaaattggcattgcgattcccaatggctgggggacagagtcatcaccaccagcacccgaacctgggccctgcccacctacaacaatcacctctacaagcaaatctccaacgggacatcgggaggagccaccaacgacaacacctacttcggctacagcaccccctgggggtattttgactttaacagattccactgccacttttcaccacgtgactggcagcgactcatcaacaacaactggggattccggcccaagagactcagcttcaagctcttcaacatccaggtcaaggaggtcacgcagaatgaaggcaccaagaccatcgccaataacctcaccagcaccatccaggtgtttacggactcggagtaccagctgccgtacgttctcggctctgcgcaccagggctgcctccctccgttcccggcggacgtgttcatgattccgcaatacggctacctgacgctcaacaatggcagccaagccgtgggacgttcatccttttactgcctggaatatttcccttctcagatgctgagaacgggcaacaactttaccttcagctacacctttgaggaagtgcctttccacagcagctacgcgcacagccagagcttggaccggctgatgaatcctctgattgaccagtacctgtactacttgtctcggactcaaacaacaggaggcacggcaaatacgcagactctgggcttcagccaaggtgggcctaatacaatggccaatcaggcaaagaactggctgccaggaccctgttaccgccaacaacgcgtctcaacgacaaccgggcaaaacaacaatagcaactttgcctggactgctgggaccaaataccatctgaatggaagaaattcattggctaatcctggcatcgctatggcaacacacaaagacgacgaggagcgtttttttcccagtaacgggatcctgatttttggcaaacaaaatgctgccagagacaatgcggattacagcgatgtcatgctcaccagcgaggaagaaatcaaaaccactaaccctgtggctacagaggaatacggtatcgtggcagataacttgcagcagcaaaacacggctcctcaaattggaactgtcaacagccagggggccttacccggtatggtctggcagaaccgggacgtgtacctgcagggtcccatctgggccaagattcctcacacggacggcaacttccacccgtctccgctgatgggcggctttggcctgaaacatcctccgcctcagatcctgatcaagaacacgcctgtacctgcggatcctccgaccaccttcaaccagtcaaagctgaactctttcatcacgcaatacagcaccggacaggtcagcgtggagatcgagtgggagctgcagaaggaaaacagcaagcgctggaacccggagatccagtacacttccaactattacaagtctaataatgttgaatttgctgttaatactgaaggtgtatatagtgaaccccgccccattggcaccagatacctgactcgtaatctgtaa

SEQ ID NO: 338 - protein, 737 aa, Artificial Sequence
  source: /note="Description of Artificial Sequence: Synthetic polypeptide"
MAADGYLPDWLEDNLSEGIREWWALKPGAPQPKANQQHQDNARGLVLPGYKYLGPGNGLDKGEPVNAADAAALEHDKAYDQQLQAGDNPYLRYNHADAEFQERLQEDTSFGGNLGRAVFQAKKRILEPLGLVEEAAKTAPGKKRPVDQSPQEPDSSSGVGKSGKQPARKRLNFGQTGDSESVPDPQPLGEPPAAPTSLGSNTMASGGGAPMADNNEGADGVGSSSGNWHCDSQWLGDRVITTSTRTWALPTYNNHLYKQISNGTSGGATNDNTYFGYSTPWGYFDFNRFHCHFSPRDWQRLINNNWGFRPKRLSFKLFNIQVKEVTQNEGTKTIANNLTSTIQVFTDSEYQLPYVLGSAHQGCLPPFPADVFMIPQYGYLTLNNGSQAVGRSSFYCLEYFPSQMLRTGNNFTFSYTFEEVPFHSSYAHSQSLDRLMNPLIDQYLYYLSRTQTTGGTANTQTLGFSQGGPNTMANQAKNWLPGPCYRQQRVSTTTGQNNNSNFAWTAGTKYHLNGRNSLANPGIAMATHKDDEERFFPSNGILIFGKQNAARDNADYSDVMLTSEEEIKTTNPVATEEYGIVADNLQQQNTAPQIGTVNSQGALPGMVWQNRDVYLQGPIWAKIPHTDGNFHPSPLMGGFGLKHPPPQILIKNTPVPADPPTTFNQSKLNSFITQYSTGQVSVEIEWELQKENSKRWNPEIQYTSNYYKSNNVEFAVNTEGVYSEPRPIGTRYLTRNL

SEQ ID NO: 339 - DNA, 2211 bp, Artificial Sequence
  source: /note="Description of Artificial Sequence: Synthetic polynucleotide"
atggctgccgatggttatcttccagattggctcgaggacaacctctctgagggcattcgcgagtggtgggacttgaaacctggagccccgaagcccaaagccaaccagcaaaagcaggacgacggccggggtctggtgcttcctggctacaagtacctcggacccttcaacggactcgacaagggggagcccgtcaacgcggcggacgcagcggccctcgagcacgacaaggcctacgaccagcagctcaaagcgggtgacaatccgtacctgcggtataaccacgccgacgccgagtttcaggagcgtctgcaagaagatacgtcttttgggggcaacctcgggcgagcagtcttccaggccaagaagcgggttctcgaacctctcggtctggttgaggaaggcgctaagacggctcctggaaagaaacgtccggtagagcagtcgccacaagagccagactcctcctcgggcatcggcaagacaggccagcagcccgctaaaaagagactcaattttggtcagactggcgactcagagtcagtccccgacccacaacctctcggagaacctccagcaacccccgctgctgtgggacctactacaatggcttcaggcggtggcgcaccaatggcagacaataacgaaggcgccgacggagtgggtaatgcctcaggaaattggcattgcgattccacatggctgggcgacagagtcatcaccaccagcacccgaacatgggccttgcccacctataacaaccacctctacaagcaaatctccagtgcttcaacgggggccagcaacgacaaccactacttcggctacagcaccccctgggggtattttgatttcaacagattccactgccatttctcaccacgtgactggcagcgactcatcaacaacaattggggattccggcccaagagactcaacttcaagctcttcaacatccaagtcaaggaggtcacgacgaatgatggcgtcacgaccatcgctaataaccttaccagcacggttcaagtcttctcggactcggagtaccagctgccgtacgttctcggctctgcccaccagggctgcctgcctccgttcccggcggacgtgttcatgattccccagtacggctacctaacactcaacaacggtagtcaggccgtgggacgctcctccttctactgcctggaatactttccttcgcagatgctgagaaccggcaacaacttccagtttacttacaccttcgaggacgtgcctttccacagcagctacgcccacagccagagcttggaccggctgatgaatcctctgattgaccagtacctgtactacttgtctcggactcaaacaacaggaggcacggcaaatacgcagactctgggcttcagccaaggtgggcctaatacaatggccaatcaggcaaagaactggctgccaggaccctgttaccgccaacaacgcgtctcaacgacaaccgggcaaaacaacaatagcaattttacctggactggtgcttcaaaatataacctcaatgggcgtgaatccatcatcaaccctggcactgctatggcctcacacaaagacgacgaagacaagttctttcccatgagcggtgtcatgatttttggaaaagagagcgccggagcttcaaacactgcattggacaatgtcatgattacagacgaagaggaaattaaagccactaaccctgtggccaccgaaagatttgggaccgtggcagtcaatttccagagcagcagcacagaccctgcgaccggagatgtgcatgctatgggagcattacctggcatggtgtggcaagatagagacgtgtacctgcagggtcccatttgggccaaaattcctcacacagatggacactttcacccgtctcctcttatgggcggctttggactcaagaacccgcctcctcagatcctcatcaaaaacacgcctgttcctgcgaatcctccggcggagttttcagctacaaagtttgcttcattcatcacccaatactccacaggacaagtgagtgtggaaattgaatgggagctgcagaaagaaaacagcaagcgctggaatcccgaagtgcagtacacatccaattatgcaaaatctgccaacgttgattttactgtggacaacaatggactttatactgagcctcgccccattggcacccgttacctcacccgtcccctgtaa

SEQ ID NO: 340 - protein, 736 aa, Artificial Sequence
  source: /note="Description of Artificial Sequence: Synthetic polypeptide"
MAADGYLPDWLEDNLSEGIREWWDLKPGAPKPKANQQKQDDGRGLVLPGYKYLGPFNGLDKGEPVNAADAAALEHDKAYDQQLKAGDNPYLRYNHADAEFQERLQEDTSFGGNLGRAVFQAKKRVLEPLGLVEEGAKTAPGKKRPVEQSPQEPDSSSGIGKTGQQPAKKRLNFGQTGDSESVPDPQPLGEPPATPAAVGPTTMASGGGAPMADNNEGADGVGNASGNWHCDSTWLGDRVITTSTRTWALPTYNNHLYKQISSASTGASNDNHYFGYSTPWGYFDFNRFHCHFSPRDWQRLINNNWGFRPKRLNFKLFNIQVKEVTTNDGVTTIANNLTSTVQVFSDSEYQLPYVLGSAHQGCLPPFPADVFMIPQYGYLTLNNGSQAVGRSSFYCLEYFPSQMLRTGNNFQFTYTFEDVPFHSSYAHSQSLDRLMNPLIDQYLYYLSRTQTTGGTANTQTLGFSQGGPNTMANQAKNWLPGPCYRQQRVSTTTGQNNNSNFTWTGASKYNLNGRESIINPGTAMASHKDDEDKFFPMSGVMIFGKESAGASNTALDNVMITDEEEIKATNPVATERFGTVAVNFQSSSTDPATGDVHAMGALPGMVWQDRDVYLQGPIWAKIPHTDGHFHPSPLMGGFGLKNPPPQILIKNTPVPANPPAEFSATKFASFITQYSTGQVSVEIEWELQKENSKRWNPEVQYTSNYAKSANVDFTVDNNGLYTEPRPIGTRYLTRPL

SEQ ID NO: 341 - DNA, 2211 bp, Artificial Sequence
  source: /note="Description of Artificial Sequence: Synthetic polynucleotide"
atggctgctgacggttatcttccagattggctcgaggacaacctttctgaaggcattcgagagtggtgggcgctgcaacctggagcccctaaacccaaggcaaatcaacaacatcaggacaacgctcggggtcttgtgcttccgggttacaaatacctcggacccggcaacggactcgacaagggggaacccgtcaacgcagcggacgcggcagccctcgagcacgacaaggcctacgaccagcagctcaaggccggtgacaacccctacctcaagtacaaccacgccgacgccgagttccaggagcggctcaaagaagatacgtcttttgggggcaacctcgggcgagcagtcttccaggccaaaaagaggcttcttgaacctcttggtctggttgaggaagcggctaagacggctcctggaaagaagaggcctgtagatcagtctcctcaggaaccggactcatcatctggtgttggcaaatcgggcaaacagcctgccagaaaaagactaaatttcggtcagactggcgactcagagtcagtcccagaccctcaacctctcggagaaccaccagcagcccccacaagtttgggatctaatacaatggcttcaggcggtggcgcaccaatggcagacaataacgagggtgccgatggagtgggtaattcctcaggaaattggcattgcgattcccaatggctgggcgacagagtcatcaccaccagcaccagaacctgggccctgcccacttacaacaaccatctctacaagcaaatctccagccaatcaggagcttcaaacgacaaccactactttggctacagcaccccttgggggtattttgactttaacagattccactgccacttctcaccacgtgactggcagcgactcattaacaacaactggggattccggcccaagaaactcagcttcaagctcttcaacatccaagttaaagaggtcacgcagaacgatggcacgacgactattgccaataaccttaccagcacggttcaagtgtttacggactcggagtatcagctcccgtacgtgctcgggtcggcgcaccaaggctgtctcccgccgtttccagcggacgtcttcatggtccctcagtatggatacctcaccctgaacaacggaagtcaagcggtgggacgctcatccttttactgcctggagtacttcccttcgcagatgctaaggactggaaataacttccaattcagctataccttcgaggatgtaccttttcacagcagctacgctcacagccagagtttggatcgcttgatgaatcctcttattgatcagtatctgtactacctgaacagaacgcaaggaacaacctctggaacaaccaaccaatcacggctgctttttagccaggctgggcctcagtctatgtctttgcaggccagaaattggctacctgggccctgctaccggcaacagagactttcaaagactgctaacgacaacaacaacagtaactttccttggacagcggccagcaaatatcatctcaatggccgcgactcgctggtgaatccaggaccagctatggccagtcacaaggacgatgaagaaaaatttttccctatgcacggcaatctaatatttggcaaagaagggacaacggcaagtaacgcagaattagataatgtaatgattacggatgaagaagagattcgtaccaccaatcctgtggcaacagagcagtatggaactgtggcaaataacttgcagagctcaaatacagctcccacgactagaactgtcaatgatcagggggccttacctggcatggtgtggcaagatcgtgacgtgtaccttcaaggacctatctgggcaaagattcctcacacggatggacactttcatccttctcctctgatgggaggctttggactgaaacatccgcctcctcaaatcatgatcaaaaatactccggtaccggcaaatcctccgacgactttcagcccggccaagtttgcttcatttatcactcagtactccactggacaggtcagcgtggaaattgagtgggagctacagaaagaaaacagcaaacgttggaatccagagattcagtacacttccaactacaacaagtctgttaatgtggactttactgtagacactaatggtgtttatagtgaacctcgccccattggcacccgttaccttacccgtcccctgtaa

SEQ ID NO: 342 - protein, 736 aa, Artificial Sequence
  source: /note="Description of Artificial Sequence: Synthetic polypeptide"
MAADGYLPDWLEDNLSEGIREWWALQPGAPKPKANQQHQDNARGLVLPGYKYLGPGNGLDKGEPVNAADAAALEHDKAYDQQLKAGDNPYLKYNHADAEFQERLKEDTSFGGNLGRAVFQAKKRLLEPLGLVEEAAKTAPGKKRPVDQSPQEPDSSSGVGKSGKQPARKRLNFGQTGDSESVPDPQPLGEPPAAPTSLGSNTMASGGGAPMADNNEGADGVGNSSGNWHCDSQWLGDRVITTSTRTWALPTYNNHLYKQISSQSGASNDNHYFGYSTPWGYFDFNRFHCHFSPRDWQRLINNNWGFRPKKLSFKLFNIQVKEVTQNDGTTTIANNLTSTVQVFTDSEYQLPYVLGSAHQGCLPPFPADVFMVPQYGYLTLNNGSQAVGRSSFYCLEYFPSQMLRTGNNFQFSYTFEDVPFHSSYAHSQSLDRLMNPLIDQYLYYLNRTQGTTSGTTNQSRLLFSQAGPQSMSLQARNWLPGPCYRQQRLSKTANDNNNSNFPWTAASKYHLNGRDSLVNPGPAMASHKDDEEKFFPMHGNLIFGKEGTTASNAELDNVMITDEEEIRTTNPVATEQYGTVANNLQSSNTAPTTRTVNDQGALPGMVWQDRDVYLQGPIWAKIPHTDGHFHPSPLMGGFGLKHPPPQIMIKNTPVPANPPTTFSPAKFASFITQYSTGQVSVEIEWELQKENSKRWNPEIQYTSNYNKSVNVDFTVDTNGVYSEPRPIGTRYLTRPL

SEQ ID NO: 343 - DNA, 2211 bp, Artificial Sequence
  source: /note="Description of Artificial Sequence: Synthetic polynucleotide"
atggctgccgatggttatcttccagattggctcgaggacaaccttagtgaaggaattcgcgagtggtgggctttgaaacctggagcccctcaacccaaggcaaatcaacaacatcaagacaacgctcgaggtcttgtgcttccgggttacaaataccttggacccggcaacggactcgacaagggggagccggtcaacgcagcagacgcggcggccctcgagcacgacaaggcctacgaccagcagctcaaggccggagacaacccgtacctcaagtacaaccacgccgacgccgagttccaggagcggctcaaagaagatacgtcttttgggggcaacctcgggcgagcagtcttccaggccaaaaagaggcttcttgaacctcttggtctggttgaggaagcggctaagacggctcctggaaagaagagaccggtagagccatcaccccagcgttctccagactcctctacgggcatcggcaagaaaggccaacagcccgctaaaaagagactcaattttggtcagactggcgactcagagtcagtccccgacccacaacctctcggagaacctccagcaacccccgctgctgtgggacctactacaatggcttcaggcggtggcgcaccaatggcagacaataacgagggtgccgatggagtgggtaattcctcaggaaattggcattgcgattcccaatggctgggcgacagagtcatcaccaccagcaccagaacctgggccctgcccacttacaacaaccatctctacaagcaaatctccagccaatcaggagcttcaaacgacaaccactactttggctacagcaccccttgggggtattttgactttaacagattccactgccacttttcaccacgtgactggcaaagactcatcaacaacaactggggattccgacccaagagactcaacttcaagctcttcaacatccaagtcaaggaggtcacgacgaatgatggcgtcacgaccatcgctaataaccttaccagcacggttcaagtcttctcggactcggagtaccagttgccgtacgtcctcggctctgcgcaccagggctgcctccctccgttcccggcggacgtgttcatgattccgcagtacggctacctaacgctcaacaatggcagccaagccgtgggacgttcatccttttactgcctggaatatttcccttctcagatgctgagaacgggcaacaactttaccttcagctacacttttgaggacgttcctttccacagcagctacgctcacagccagagtctggaccgtctcatgaatcctctcatcgaccagtacctgtattacttgagcagaacaaacactccaagtggaaccaccacgcagtcaaggcttcagttttctcaggccggagcgagtgacattcgggaccagtctaggaactggcttcctggaccctgttaccgccagcagcgcgtttctaaaacaaaaacagacaacaacaacagcaattttacctggactggtgcttcaaaatataaccttaatgggcgtgaatctataatcaaccctggcactgctatggcctcacacaaagacgacgaagacaagttctttcccatgagcggtgtcatgatttttggaaaagagagcgccggagcttcaaacactgcattggacaatgtcatgattacagacgaagaggaaattaaagccactaaccctgtggccaccgaaagatttgggaccgtggcagtcaatttccagagcagcagcacagaccctgcgaccggagatgtgcatgttatgggagccttacctggaatggtgtggcaagacagagacgtatacctgcagggtcctatttgggccaaaattcctcacacggatggacactttcacccgtctcctcttatgggcggctttggactcaagaacccgcctcctcagatcctcatcaaaaacacgcctgttcctgcgaatcctccggcggagttttcagctacaaagtttgcttcattcatcacccaatactccacaggacaagtgagtgtggaaattgaatgggagctgcagaaagaaaacagcaagcgctggaatcccgaagtgcagtacacatccaattatgcaaaatctgccaacgttgattttactgtggacaacaatggactttatactgagcctcgccccattggcacccgttaccttacccgtcccctgtaa

SEQ ID NO: 344 - protein, 736 aa, Artificial Sequence
  source: /note="Description of Artificial Sequence: Synthetic polypeptide"
MAADGYLPDWLEDNLSEGIREWWALKPGAPQPKANQQHQDNARGLVLPGYKYLGPGNGLDKGEPVNAADAAALEHDKAYDQQLKAGDNPYLKYNHADAEFQERLKEDTSFGGNLGRAVFQAKKRLLEPLGLVEEAAKTAPGKKRPVEPSPQRSPDSSTGIGKKGQQPAKKRLNFGQTGDSESVPDPQPLGEPPATPAAVGPTTMASGGGAPMADNNEGADGVGNSSGNWHCDSQWLGDRVITTSTRTWALPTYNNHLYKQISSQSGASNDNHYFGYSTPWGYFDFNRFHCHFSPRDWQRLINNNWGFRPKRLNFKLFNIQVKEVTTNDGVTTIANNLTSTVQVFSDSEYQLPYVLGSAHQGCLPPFPADVFMIPQYGYLTLNNGSQAVGRSSFYCLEYFPSQMLRTGNNFTFSYTFEDVPFHSSYAHSQSLDRLMNPLIDQYLYYLSRTNTPSGTTTQSRLQFSQAGASDIRDQSRNWLPGPCYRQQRVSKTKTDNNNSNFTWTGASKYNLNGRESIINPGTAMASHKDDEDKFFPMSGVMIFGKESAGASNTALDNVMITDEEEIKATNPVATERFGTVAVNFQSSSTDPATGDVHVMGALPGMVWQDRDVYLQGPIWAKIPHTDGHFHPSPLMGGFGLKNPPPQILIKNTPVPANPPAEFSATKFASFITQYSTGQVSVEIEWELQKENSKRWNPEVQYTSNYAKSANVDFTVDNNGLYTEPRPIGTRYLTRPL

SEQ ID NO: 345 - DNA, 2211 bp, Artificial Sequence
  source: /note="Description of Artificial Sequence: Synthetic polynucleotide"
atggctgccgatggttatcttccagattggctcgaggacaacctctctgagggcattcgcgagtggtgggacttgaaacctggagcccctaaacccaaggcaaatcaacaacatcaggacaacgctcgaggtcttgtgcttccgggttacaaataccttggacccggcaacggactcgacaagggggagccggtcaacgcagcagacgcggcggccctcgagcacgacaaggcctacgaccagcagctcaaggccggagacaacccgtacctcaagtacaaccacgccgacgccgagttccaggagcggctcaaagaagatacgtcttttgggggcaacctcgggcgagcagtcttccaggccaaaaagaggcttcttgaacctcttggtctggttgaggaagcggctaagacggctcctggaaagaagagaccggtagagccatcaccccagcgttctccagactcctctacgggcatcggcaagaaaggccaacagcccgctaaaaagagactcaattttggtcagactggcgactcagagtcagtccccgacccacaacctctcggagaacctccagcaacccccgctgctgtgggacctactacaatggcttcaggcggtggcgcaccaatggcagacaataacgagggtgccgatggagtgggtaattcctcaggaaattggcattgcgattcccaatggctgggcgacagagtcatcaccaccagcaccagaacctgggccctgcccacttacaacaaccatctctacaagcaaatctccagccaatcaggagcttcaaacgacaaccactactttggctacagcaccccttgggggtattttgactttaacagattccactgccacttttcaccacgtgactggcaaagactcatcaacaacaactggggattccgacccaagagactcaacttcaagctcttcaacatccaagtcaaggaggtcacgacgaatgatggcgtcacgaccatcgctaataaccttaccagcacggttcaagtcttctcggactcggagtaccagttgccgtacgtcctcggctctgcgcaccagggctgcctccctccgttcccggcggacgtgttcatgattccgcagtacggctacctaacgctcaacaatggcagccaagccgtgggacgttcatccttttactgcctggaatatttcccttctcagatgctgagaacgggcaacaactttaccttcagctacacttttgaggacgttcctttccacagcagctacgctcacagccagagtctggaccgtctcatgaatcccctcatcgaccagtacctgtattacttgagcagaacaaacactccaagtggaaccaccacgcagtcaaggcttcagttttctcaggccggagcgagtgacattcgggaccagtctaggaactggcttcctggaccctgttaccggcagcagcgcgtttctaaaacaaaaacagacaacaacaacagcaactttacctggactggtgcttcaaaatataaccttaatgggcgtgaatctataatcaaccctggcactgctatggcctcacacaaagacgacgaagacaagttctttcccatgagcggtgtcatgatttttggaaaggagagcgccggagcttcaaacactgcattggacaatgtcatgatcacagacgaagaggaaatcaaagccactaaccccgtggccaccgaaagatttgggactgtggcagtcaatctccagagcagcagcacagaccctgcgaccggagatgtgcatgttatgggagccttacctggaatggtgtggcaagacagagacgtgtacctgcagggtcctatttgggccaaaattcctcacacggatggacactttcacccgtctcctctcatgggcggctttggacttaagcacccgcctcctcagatcctcatcaaaaacacgcctgttcctgcgaatcctccggcagagttttcggctacaaagtttgcttcattcatcacccagtattccacaggacaagtgagtgtggaaattgaatgggagctgcagaaagaaaacagcaagcgctggaatcccgaagtgcagtacacatccaattatgcaaaatctgccaacgttgattttactgtggacaacaatggactttatactgagcctcgccccattggcacccgttacctcacccgtcccctgtaa

SEQ ID NO: 346 - protein, 736 aa, Artificial Sequence
  source: /note="Description of Artificial Sequence: Synthetic polypeptide"
MAADGYLPDWLEDNLSEGIREWWDLKPGAPKPKANQQHQDNARGLVLPGYKYLGPGNGLDKGEPVNAADAAALEHDKAYDQQLKAGDNPYLKYNHADAEFQERLKEDTSFGGNLGRAVFQAKKRLLEPLGLVEEAAKTAPGKKRPVEPSPQRSPDSSTGIGKKGQQPAKKRLNFGQTGDSESVPDPQPLGEPPATPAAVGPTTMASGGGAPMADNNEGADGVGNSSGNWHCDSQWLGDRVITTSTRTWALPTYNNHLYKQISSQSGASNDNHYFGYSTPWGYFDFNRFHCHFSPRDWQRLINNNWGFRPKRLNFKLFNIQVKEVTTNDGVTTIANNLTSTVQVFSDSEYQLPYVLGSAHQGCLPPFPADVFMIPQYGYLTLNNGSQAVGRSSFYCLEYFPSQMLRTGNNFTFSYTFEDVPFHSSYAHSQSLDRLMNPLIDQYLYYLSRTNTPSGTTTQSRLQFSQAGASDIRDQSRNWLPGPCYRQQRVSKTKTDNNNSNFTWTGASKYNLNGRESIINPGTAMASHKDDEDKFFPMSGVMIFGKESAGASNTALDNVMITDEEEIKATNPVATERFGTVAVNLQSSSTDPATGDVHVMGALPGMVWQDRDVYLQGPIWAKIPHTDGHFHPSPLMGGFGLKHPPPQILIKNTPVPANPPAEFSATKFASFITQYSTGQVSVEIEWELQKENSKRWNPEVQYTSNYAKSANVDFTVDNNGLYTEPRPIGTRYLTRPL

SEQ ID NO: 347 - DNA, 2214 bp, Artificial Sequence
  source: /note="Description of Artificial Sequence: Synthetic polynucleotide"
atggctgccgatggttatcttccagattggctcgaggacaaccttagtgaaggaattcgcgagtggtgggctttgaaacctggagcccctcaacccaaggcaaatcaacaacatcaagacaacgctcgaggtcttgtgcttccgggttacaaataccttggacccggcaacggactcgacaagggggagccggtcaacgcagcagacgcggcggccctcgagcacgacaaggcctacgaccagcagctgcaggcgggtgacaatccgtacctgcggtataaccacgccgacgccgagtttcaggagcgtctgcaagaagatacgtcttttgggggcaaccttggcagagcagtcttccaggccaaaaagaggatccttgagcctcttggtctggttgaggaagcagctaaaacggctcctggaaagaagaggcctgtagatcagtctcctcaggaaccggactcatcatctggtgttggcaaatcgggcaaacagcctgccagaaaaagactaaatttcggtcagactggcgactcagagtcagtcccagaccctcaacctctcggagaaccaccagcagcccccacaagtttgggatctaatacaatggcttcaggcggtggcgcaccaatggcagacaataacgagggtgccgatggggtgggtagttcctcgggaaattggcattgcgattcccaatgactgggggacagagtcatcaccaccagcacccgaacctgggccctgcccacctacaacaatcacctctacaagcaaatctccaacgggacatcgggaggagccaccaacgacaacacctacttcggctacagcaccccctgggggtattttgactttaacagattccactgccacttttcaccacgtgactggcagcgactcatcaacaacaactggggattccggcccaagagactcagcttcaagctcttcaacatccaggtcaaggaggtcacgcagaatgaaggcaccaagaccatcgccaataacctcaccagcaccatccaggtgtttacggactcggagtaccagctgccgtacgttctcggctctgcgcaccagggctgcctccctccgttcccggcggacgtgttcatgattccgcaatacggctacctgacgctcaacaatggcagccaagccgtgggacgttcatccttttactgcctggaatatttcccttctcagatgctgagaacgggcaacaactttaccttcagctacacctttgaggaagtgcctttccacagcagctacgcgcacagccagagcttggaccggctgatgaatcctctgattgaccagtacctgtactacttgtctcggactcaaacaacaggaggcacggcaaatacgcagactctgggcttcagccaaggtgggcctaatacaatggccaatcaggcaaagaactggctgccaggaccctgttaccgccaacaacgcgtctcaacgacaaccgggcaaaacaacaatagcaactttgcctggactgctgggaccaaataccatctgaatggaagaaattcattggctaatcctggcatcgctatggcaacacacaaagacgacgaggagcgtttttttcccagtaacgggatcctgatttttggcaaacaaaatgctgccagagacaatgcggattacagcgatgtcatgctcaccagcgaggaagaaatcaaaaccactaaccctgtggctacagaggaatacggtatcgtggcagataacttgcagcagcaaaacacggctcctcaaattggaactgtcaacagccagggggccttacccggtatggtctggcagaaccgggacgtgtacctgcagggtcccatctgggccaagattcctcacacggacggcaacttccacccgtctccgctgatgggcggctttggcctgaaacatcctccgcctcagatcctgatcaagaacacgcctgtacctgcggatcctccgaccaccttcaaccagtcaaagctgaactctttcatcacgcaatacagcaccggacaggtcagcgtggagatcgagtgggagctgcagaaggaaaacagcaagcgctggaacccggagatccagtacacttccaactattacaagtctaataatgttgaatttgctgttaatactgaaggtgtatatagtgaaccccgccccattggcaccagatacctgactcgtaatctgtaa

SEQ ID NO: 348 - protein, 736 aa, Artificial Sequence
  source: /note="Description of Artificial Sequence: Synthetic polypeptide"
MAADGYLPDWLEDNLSEGIREWWALKPGAPQPKANQQHQDNARGLVLPGYKYLGPGNGLDKGEPVNAADAAALEHDKAYDQQLQAGDNPYLRYNHADAEFQERLQEDTSFGGNLGRAVFQAKKRILEPLGLVEEAAKTAPGKKRPVDQSPQEPDSSSGVGKSGKQPARKRLNFGQTGDSESVPDPQPLGEPPAAPTSLGSNTMASGGGAPMADNNEGADGVGSSSGNWHCDSQLGDRVITTSTRTWALPTYNNHLYKQISNGTSGGATNDNTYFGYSTPWGYFDFNRFHCHFSPRDWQRLINNNWGFRPKRLSFKLFNIQVKEVTQNEGTKTIANNLTSTIQVFTDSEYQLPYVLGSAHQGCLPPFPADVFMIPQYGYLTLNNGSQAVGRSSFYCLEYFPSQMLRTGNNFTFSYTFEEVPFHSSYAHSQSLDRLMNPLIDQYLYYLSRTQTTGGTANTQTLGFSQGGPNTMANQAKNWLPGPCYRQQRVSTTTGQNNNSNFAWTAGTKYHLNGRNSLANPGIAMATHKDDEERFFPSNGILIFGKQNAARDNADYSDVMLTSEEEIKTTNPVATEEYGIVADNLQQQNTAPQIGTVNSQGALPGMVWQNRDVYLQGPIWAKIPHTDGNFHPSPLMGGFGLKHPPPQILIKNTPVPADPPTTFNQSKLNSFITQYSTGQVSVEIEWELQKENSKRWNPEIQYTSNYYKSNNVEFAVNTEGVYSEPRPIGTRYLTRNL

SEQ ID NO: 349 - DNA, 2214 bp, Artificial Sequence
  source: /note="Description of Artificial Sequence: Synthetic polynucleotide"
atggctgccgatggttatcttccagattggctcgaggacaaccttagtgaaggaattcgcgagtggtgggctttgaaacctggagcccctcaacccaaggcaaatcaacaacatcaagacaacgctcgaggtcttgtgcttccgggttacaaataccttggacccggcaacggactcgacaagggggagccggtcaacgcagcagacgcggcggccctcgagcacgacaaggcctacgaccagcagctgcaggcgggtgacaatccgtacctgcggtataaccacgccgacgccgagtttcaggagcgtctgcaagaagatacgtcttttgggggcaaccttggcagagcagtcttccaggccaaaaagaggatccttgagcctcttggtctggttgaggaagcagctaaaacggctcctggaaagaagaggcctgtagatcagtctcctcaggaaccggactcatcatctggtgttggcaaatcgggcaaacagcctgccagaaaaagactaaatttcggtcagactggcgactcagagtcagtcccagaccctcaacctctcggagaaccaccagcagcccccacaagtttgggatctaatacaatggcttcaggcggtggcgcaccaatggcagacaataacgagggtgccgatggggtgggtagttcctcgggaaattggcattgcgattcccaatggctgggggacagagtcatcaccaccagcacccgaacctgggccctgcccacctacaacaatcacctctacaagcaaatctccaacgggacatcgggaggagccaccaacgacaacacctacttcggctacagcaccccctgggggtattttgactttaacagattccactgccacttttcaccacgtgactggcagcgactcatcaacaacaactggggattccggcccaagagactcagcttcaagctcttcaacatccaggtcaaggaggtcacgcagaatgaaggcaccaagaccatcgccaataacctcaccagcaccatccaggtgtttacggactcggagtaccagctgccgtacgttctcggctctgcgcaccagggctgcctccctccgttcccggcggacgtgttcatgattccgcaatacggctacctgacgctcaacaatggcagccaagccgtgggacgttcatccttttactgcctggaatatttcccttctcagatgctgagaacgggcaacaactttaccttcagctacacctttgaggaagtgccttttcacagcagctacgcgcacagccagagcttggaccggctgatgaatcctctgattgaccagtacctgtactacttgtctcggactcaaacaacaggaggcacggcaaatacgcagactctgggcttcagccaaggtgggcctaatacaatggccaatcaggcaaagaactggctgccaggaccctgttaccgccaacaacgcgtctcaacgacaaccgggcaaaacaacaatagcaactttgcctggactgctgggaccaaataccatctgaatggaagaaattcattggctaatcctggcatcgctatggcaacacacaaagacgacgaggagcgtttttttcccagtaacgggatcctgatttttggcaaacaaaatgctgccagagacaatgcggattacagcgatgtcatgctcaccagcgaggaagaaatcaaaaccactaaccctgtggctacagaggaatacggtatcgtggcagataacttgcagcagcaaaacacggctcctcaaattggaactgtcaacagccagggggccttacccggtatggtctggcagaaccgggacgtgtacctgcagggtcccatctgggccaagattcctcacacggacggcaacttccacccgtctccgctgatgggcggctttggcctgaaacatcctccgcctcagatcctgatcaagaacacgcctgtacctgcggatcctccgaccaccttcaaccagtcaaagctgaactctttcatcacgcaatacagcaccggacaggtcagcgtggagatcgagtgggagctgcagaaggaaaacagcaagcgctggaacccggagatccagtacacttccaactattacaagtctaataatgttgaatttgctgttaatactgaaggtgtatatagtgaaccccgccccattggcaccagatacctgactcgtaatctgtaa

SEQ ID NO: 350 - protein, 737 aa, Artificial Sequence; identical to SEQ ID NO: 338
  source: /note="Description of Artificial Sequence: Synthetic polypeptide"

SEQ ID NO: 351 - DNA, 2211 bp, Artificial Sequence
  source: /note="Description of Artificial Sequence: Synthetic polynucleotide"
atggctgccgatggttatcttccagattggctcgaggacaacctctctgagggcattcgcgagtggtgggacttgaaacctggagcccctaaacccaaggcaaatcaacaacatcaggacaacgctcgaggtcttgtgcttccgggttacaaataccttggacccggcaacggactcgacaagggggagccggtcaacgcagcagacgcggcggccctcgagcacgacaaggcctacgaccagcagctcaaggccggagacaacccgtacctcaagtacaaccacgccgacgccgagttccaggagcggctcaaagaagatacgtcttttgggggcaacctcgggcgagcagtcttccaggccaaaaagaggcttcttgaacctcttggtctggttgaggaagcggctaagacggctcctggaaagaagagaccggtagagccatcaccccagcgttctccagactcctctacgggcatcggcaagaaaggccaacagcccgctaaaaagagactcaattttggtcagactggcgactcagagtcagtccccgacccacaacctctcggagaacctccagcaacccccgctgctgtgggacctactacaatggcttcaggcggtggcgcaccaatggcagacaataacgagggtgccgatggagtgggtaattcctcaggaaattggcattgcgattcccaatggctgggcgacagagtcatcaccaccagcaccagaacctgggccctgcccacttacaacaaccatctctacaagcaaatctccagccaatcaggagcttcaaacgacaaccactactttggctacagcaccccttgggggtattttgactttaacagattccactgccacttttcaccacgtgactggcaaagactcatcaacaacaactggggattccgacccaagagactcaacttcaagctcttcaacatccaagtcaaggaggtcacgacgaatgatggcgtcacgaccatcgctaataaccttaccagcacggttcaagtcttctcggactcggagtaccagttgccgtacgtcctcggctctgcgcaccagggctgcctccctccgttcccggcggacgtgttcatgattccgcagtacggctacctaacgctcaacaatggcagccaagccgtgggacgttcatccttttactgcctggaatatttcccttctcagatgctgagaacgggcaacaactttaccttcagctacacttttgaggacgttcctttccacagcagctacgctcacagccagagtctggaccgtctcatgaatcctctcatcgaccagtacctgtattacttgagcagaacaaacactccaagtggaaccaccacgcagtcaaggcttcagttttctcaggccggagcgagtgacattcgggaccagtctaggaactggcttcctggaccctgttaccgccagcagcgcgtttctaaaacaaaaacagacaacaacaacagcaattttacctggactggtgcttcaaaatataaccttaatgggcgtgaatctataatcaaccctggcactgctatggcctcacacaaagacgacgaagacaagttctttcccatgagcggtgtcatgatttttggaaaagagagcgccggagcttcaaacactgcattggacaatgtcatgattacagacgaagaggaaattaaagccactaaccctgtggccaccgaaagatttgggaccgtggcagtcaatttccagagcagcagcacagaccctgcgaccggagatgtgcatgctatgggagcattacctggcatggtgtggcaagatagagacgtgtacctgcagggtcccatttgggccaaaattcctcacacagatggacactttcacccgtctcctcttatgggcggctttggactcaagaacccgcctcctcagatcctcatcaaaaacacgcctgttcctgcgaatcctccggcggagttttcagctacaaagtttgcttcattcatcacccaatactccacaggacaagtgagtgtggaaattgaatgggagctgcagaaagaaaacagcaagcgctggaatcccgaagtgcagtacacatccaattatgcaaaatctgccaacgttgattttactgtggacaacaatggactttatactgagcctcgccccattggcacccgttaccttacccgtcccctgtaa

SEQ ID NO: 352 - protein, 736 aa, Artificial Sequence
  source: /note="Description of Artificial Sequence: Synthetic polypeptide"
MAADGYLPDWLEDNLSEGIREWWDLKPGAPKPKANQQHQDNARGLVLPGYKYLGPGNGLDKGEPVNAADAAALEHDKAYDQQLKAGDNPYLKYNHADAEFQERLKEDTSFGGNLGRAVFQAKKRLLEPLGLVEEAAKTAPGKKRPVEPSPQRSPDSSTGIGKKGQQPAKKRLNFGQTGDSESVPDPQPLGEPPATPAAVGPTTMASGGGAPMADNNEGADGVGNSSGNWHCDSQWLGDRVITTSTRTWALPTYNNHLYKQISSQSGASNDNHYFGYSTPWGYFDFNRFHCHFSPRDWQRLINNNWGFRPKRLNFKLFNIQVKEVTTNDGVTTIANNLTSTVQVFSDSEYQLPYVLGSAHQGCLPPFPADVFMIPQYGYLTLNNGSQAVGRSSFYCLEYFPSQMLRTGNNFTFSYTFEDVPFHSSYAHSQSLDRLMNPLIDQYLYYLSRTNTPSGTTTQSRLQFSQAGASDIRDQSRNWLPGPCYRQQRVSKTKTDNNNSNFTWTGASKYNLNGRESIINPGTAMASHKDDEDKFFPMSGVMIFGKESAGASNTALDNVMITDEEEIKATNPVATERFGTVAVNFQSSSTDPATGDVHAMGALPGMVWQDRDVYLQGPIWAKIPHTDGHFHPSPLMGGFGLKNPPPQILIKNTPVPANPPAEFSATKFASFITQYSTGQVSVEIEWELQKENSKRWNPEVQYTSNYAKSANVDFTVDNNGLYTEPRPIGTRYLTRPL

SEQ ID NO: 353 - DNA, 2211 bp, Artificial Sequence
  source: /note="Description of Artificial Sequence: Synthetic polynucleotide"
atggctgccgatggttatcttccagattggctcgaggacaaccttagtgaaggaattcgcgagtggtgggcgctgaaacctggagccccgaagcccaaagccaaccagcaaaagcaggacgacggccggggtctggtgcttccgggttacaaatacctcggacccggtaacggactcgacaaaggagagccggtcaacgaggcggacgcggcagccctcgagcacgacaaggcctacgaccagcagctcaaagcgggtgacaatccgtacctgcggtataaccacgccgacgccgagtttcaggagcgtctgcaagaagatacgtcttttgggggcaacctcgggcgagcagtcttccaggccaagaagcgggttctcgaacctctcggtctggttgaggaaggcgctaagacggctcccggaaagaaacgtccggtagagcagtcgccacaagagccagactcctctacgggcatcggcaagaaaggccaacagcccgccagaaaaagactcaatttcggtcagactggcgactcagagtcagttccagaccctcaacctctcggagaacctccagcagcgccctctggtgtgggacctactacaatggcttcaggcggtggcgcaccaatggcagacaataacgaaggcgccgacggagtgggtaatgcctcaggaaattggcattgcgattccacatggctgggcgacagagtcatcaccaccagcacccgaacatgggccttgcccacctataacaaccacctctacaagcaaatctccagtgcttcaacgggggccagcaacgacaacacctacttcggctacagcaccccctgggggtattttgatttcaacagattccactgccatttctcaccacgtgactggcagcgactcatcaacaacaattggggattccggcccaagagactcaacttcaaactcttcaacatccaagtcaaggaggtcacgacgaatgatggcgtcacgaccatcgctaataaccttaccagcacggttcaagtcttctcggactcggagtaccagttgccgtacgtcctcggctctgcgcaccagggctgcctccctccgttcccggcggacgtgttcatgattccgcagtacggctacctaacgctcaacaatggcagccaggcagtgggacggtcatccttttactgcctggaatatttcccatcgcagatgctgagaacgggcaataactttaccttcagctacaccttcgaggacgtgcctttccacagcagctacgcgcacagccagagcctggaccggctgatgaatcctctcatcgaccagtacctgtattacctgaacagaactcagaatcagtccggaagtgcccaaaacaaggacttgctgtttagccgggggtctccagctggcatgtctgttcagcccaaaaactggctacctggaccctgttatcggcagcagcgcgtttctaaaacaaaaacagacaacaacaacagcaattttacctggactggtgcttcaaaatataacctcaatgggcgtgaatccatcatcaaccctggcactgctatggcctcacacaaagacgacgaagacaagttctttcccatgagcggtgtcatgatttttggaaaagagagcgccggagcttcaaacactgcattggacaatgtcatgattacagacgaagaggaaattaaagccactaaccctgtggccaccgaaagatttgggaccgtggcagtcaatttccagagcagcagcacagaccctgcgaccggagatgtgcatgttatgggagccttacctggaatggtgtggcaagacagagacgtatacctgcagggtcctatttgggccaaaattcctcacacagatggacactttcacccgtctcctcttatgggcggctttggactcaagaacccgcctcctcagatcctcatcaaaaacacgcctgttcctgcgaatcctccggcagagttttcggctacaaagtttgcttcattcatcacccagtattccacaggacaagtgagcgtggagattgaatgggagctgcagaaagaaaacagcaaacgctggaatcccgaagtgcagtatacatctaactatgcaaaatctgccaacgttgatttcactgtggacaacaatggactttatactgagcctcgccccattggcacccgttacctcacccgtcccctgtaa

SEQ ID NO: 354 - protein, 736 aa, Artificial Sequence
  source: /note="Description of Artificial Sequence: Synthetic polypeptide"
MAADGYLPDWLEDNLSEGIREWWALKPGAPKPKANQQKQDDGRGLVLPGYKYLGPGNGLDKGEPVNEADAAALEHDKAYDQQLKAGDNPYLRYNHADAEFQERLQEDTSFGGNLGRAVFQAKKRVLEPLGLVEEGAKTAPGKKRPVEQSPQEPDSSTGIGKKGQQPARKRLNFGQTGDSESVPDPQPLGEPPAAPSGVGPTTMASGGGAPMADNNEGADGVGNASGNWHCDSTWLGDRVITTSTRTWALPTYNNHLYKQISSASTGASNDNTYFGYSTPWGYFDFNRFHCHFSPRDWQRLINNNWGFRPKRLNFKLFNIQVKEVTTNDGVTTIANNLTSTVQVFSDSEYQLPYVLGSAHQGCLPPFPADVFMIPQYGYLTLNNGSQAVGRSSFYCLEYFPSQMLRTGNNFTFSYTFEDVPFHSSYAHSQSLDRLMNPLIDQYLYYLNRTQNQSGSAQNKDLLFSRGSPAGMSVQPKNWLPGPCYRQQRVSKTKTDNNNSNFTWTGASKYNLNGRESIINPGTAMASHKDDEDKFFPMSGVMIFGKESAGASNTALDNVMITDEEEIKATNPVATERFGTVAVNFQSSSTDPATGDVHVMGALPGMVWQDRDVYLQGPIWAKIPHTDGHFHPSPLMGGFGLKNPPPQILIKNTPVPANPPAEFSATKFASFITQYSTGQVSVEIEWELQKENSKRWNPEVQYTSNYAKSANVDFTVDNNGLYTEPRPIGTRYLTRPL

SEQ ID NO: 355 - DNA, 2205 bp, Artificial Sequence
  source: /note="Description of Artificial Sequence: Synthetic polynucleotide"
atggctgctgacggttatcttccagattggctcgaggacaacctttctgaaggcattcgtgagtggtgggctctgaaacctggagtccctcaacccaaagcgaaccaacaacaccaggacaaccgtcggggtcttgtgcttccgggttacaaatacctcggacccggtaacggactcgacaaaggagagccggtcaacgaggcggacgcggcagccctcgaacacgacaaggcctacgaccagcagctcaaggccggagacaacccgtacctcaagtacaaccacgccgacgccgagttccaggagcggctcaaagaagatacgtcttttgggggcaacctcgggcgagcagtcttccaggccaaaaagaggcttcttgaacctcttggtctggttgaggaagcggctaagacggctcctggaaagaagaggcctgtagagcagtctcctcaggaaccggactcctccgcgggtattggcaaatcgggtgcacagcccgctaaaaagagactcaatttcggtcagactggcgacacagagtcagtcccagaccctcaaccaatcggagaacctcccgcagccccctcaggtgtgggatctcttacaatggcttcaggtggtggcgcaccagtggcagacaataacgaaggtgccgatggagtgggtagttcctcgggaaattggcattgcgattcccaatggctgggggacagagtcatcaccaccagcacccgaacctgggccctgcccacctacaacaaccacctctacaaacaaatttccagccaatcaggagcctcgaacgacaatcactactttggctacagcaccccttgggggtattttgacttcaacagattccactgccacttttcaccacgtgactggcagcgactcatcaacaacaactggggattccggcccaagagactcagcttcaagctcttcaacatccaggtcaaagaggttacggacaacaatggagtcaagaccatcgccaataaccttaccagcacggtccaggtcttcacggactcagactatcagctcccgtacgtgctcgggtcggctcacgagggctgcctcccgccgttcccagcggacgttttcatgattcctcagtacgggtatctgacgcttaatgatggaagccaggccgtgggtcgttcgtccttttactgcctggaatatttcccgtcgcaaatgctaagaacgggtaacaacttccagttcagctacgagtttgagaacgtacctttccatagcagctacgctcacagccaaagcctggaccgactaatgaatccactcatcgaccaatacttgtactatctctcaaagactattaacggttctggacagaatcaacaaacgctaaaattcagtgtggccggacccagcaacatggctgtccagggaagaaactacatacctggacccagctaccgacaacaacgtgtctcaaccactgtgactcaaaacaacaacagcgaatttgcttggcctggagcttcttcttgggctctcaatggacgtaatagcttgatgaatcctggacctgctatggccagccacaaagaaggagaggaccgtttctttcctttgtctggatctttaatttttggcaaacaaggaactggaagagacaacgtggatgcggacaaagtcatgataaccaacgaagaagaaattaaaactactaacccggtagcaacggagtcctatggacaagtggccacaaaccaccagagtgcccaagcacaggcgcagaccggctgggttcaaaaccaaggaatacttccgggtatggtttggcaggacagagatgtgtacctgcaaggacccatctgggccaagattcctcacacggacggcaacttccacccgtctccgctgatgggcggctttggcctgaaacatcctccgcctcagatcctgatcaagaacacgcctgtacctgcggatcctccgaccaccttcaaccagtcaaagctgaactctttcatcacgcaatacagcaccggacaggtcagcgtggaaattgaatgggagctgcagaaggaaaacagcaagcgctggaatcccgaagtgcagtatacatctaactatgcaaaatctgccaacgttgatttcactgtggacaacaatggactttatactgagcctcgccccattggcacccgttacctcacccgtcccctgtaa

SEQ ID NO: 356 - protein, 734 aa, Artificial Sequence
  source: /note="Description of Artificial Sequence: Synthetic polypeptide"
MAADGYLPDWLEDNLSEGIREWWALKPGVPQPKANQQHQDNRRGLVLPGYKYLGPGNGLDKGEPVNEADAAALEHDKAYDQQLKAGDNPYLKYNHADAEFQERLKEDTSFGGNLGRAVFQAKKRLLEPLGLVEEAAKTAPGKKRPVEQSPQEPDSSAGIGKSGAQPAKKRLNFGQTGDTESVPDPQPIGEPPAAPSGVGSLTMASGGGAPVADNNEGADGVGSSSGNWHCDSQWLGDRVITTSTRTWALPTYNNHLYKQISSQSGASNDNHYFGYSTPWGYFDFNRFHCHFSPRDWQRLINNNWGFRPKRLSFKLFNIQVKEVTDNNGVKTIANNLTSTVQVFTDSDYQLPYVLGSAHEGCLPPFPADVFMIPQYGYLTLNDGSQAVGRSSFYCLEYFPSQMLRTGNNFQFSYEFENVPFHSSYAHSQSLDRLMNPLIDQYLYYLSKTINGSGQNQQTLKFSVAGPSNMAVQGRNYIPGPSYRQQRVSTTVTQNNNSEFAWPGASSWALNGRNSLMNPGPAMASHKEGEDRFFPLSGSLIFGKQGTGRDNVDADKVMITNEEEIKTTNPVATESYGQVATNHQSAQAQAQTGWVQNQGILPGMVWQDRDVYLQGPIWAKIPHTDGNFHPSPLMGGFGLKHPPPQILIKNTPVPADPPTTFNQSKLNSFITQYSTGQVSVEIEWELQKENSKRWNPEVQYTSNYAKSANVDFTVDNNGLYTEPRPIGTRYLTRPL

SEQ ID NO: 357 - DNA, 2211 bp, Artificial Sequence
  source: /note="Description of Artificial Sequence: Synthetic polynucleotide"
atggctgccgatggttatcttccagattggctcgaggacaacctctctgagggcattcgcgagtggtgggcgctgaaacctggagccccgaagcccaaagccaaccagcaaaagcaggacgacggccggggtctggtgcttcctggctacaagtacctcggacccttcaacggactcgacaagggggagcccgtcaacgcggcggacgcagcggccctcgagcacgacaaggcctacgaccagcagctgcaggcgggtgacaatccgtacctgcggtataaccacgccgacgccgagtttcaggagcgtctgcaagaagatacgtcttttgggggcaacctcgggcgagcagtcttccaggccaagaagtgggttctcgaacctctcggtctggttgaggaaggcgctaagacggctcctggaaagaaacgtccggtagagcagtcgccacaagagccagactcctcctcgggcatcggcaagacaggccagcagcccgctaaaaagagactcaattttggtcagactggcgactcagagtcagtccccgacccacaacctctcggagaacctccagcaacccccgctgctgtgggacctactacaatggcttcaggcggtggcgcaccaatggcagacaataacgaaggcgccgacggagtgggtaatgcctcaggaaattggcattgcgattccacatggctgggcgacagagtcatcaccaccagcacccgcacctgggccttgcccacctacaataaccacctctacaagcaaatctccagtgcttcaacgggggccagcaacgacaaccactacttcggctacagcaccccctgggggtattttgatttcaacagattccactgccatttctcaccacgtgactggcagcgactcatcaacaacaattggggattccggcccaagagactcaacttcaagctcttcaacatccaagtcaaggaggtcacgacgaatgatggcgtcacaaccatcgctaataaccttaccagcacggttcaagtcttctcggactcggagtaccagcttccgtacgtcctcggctctgcgcaccagggctgcctccctccgttcccggcggacgtgttcatgattccgcaatacggctacctgacgctcaacaatggcagccaagccgtgggacgttcatccttttactgcctggaatatttcccttctcagatgctgagaacgggcaacaactttaccttcagctacacctttgaggaagtgcctttccacagcagctacgcgcacagccagagcctggaccggctgatgaatcctctcatcgaccaatacctgtattacctgaacagaactcaaaatcagtccggaagtgcccaaaacaaggacttgctgtttagccgtgggtctccagctggcatgtctgttcagcccaaaaactggctacctggaccctgttatcggcagcagcgcgtttctaaaacaaaaacagacaacaacaacagcaattttacctggactggtgcttcaaaatataacctcaatgggcgtgaatccatcatcaaccctggcactgctatggcctcacacaaagacgacgaagacaagttctttcccatgagcggtgtcatgatttttggaaaggagagcgccggagcttcaaacactgcattggacaatgtcatgatcaccgacgaagaggaaatcaaagccactaaccccgtggccaccgaaagatttgggactgtggcagtcaatctccagagcagcagcacagaccctgcgaccggagatgtgcatgttatgggagccttacctggcatggtgtggcaagatagagacgtgtacctgcagggtcccatttgggccaaaattcctcacacagatggacactttcacccgtctcctcttatgggcggctttggactcaagaacccgcctcctcagatcctcatcaaaaacacgcctgttcctgcgaatcctccggcggagttttcagctacaaagtttgcttcattcatcacccaatactccacaggacaagtgagtgtggaaattgaatgggagctgcagaaagaaaacagcaagcgctggaatcccgaagtgcagtacacatccaattatgcaaaatctgccaacgttgattttactgtggacaacaatggactttatactgagcctcgccccattggcacccgttacctcacccgtcccctgtaa

SEQ ID NO: 358 - protein, 736 aa, Artificial Sequence
  source: /note="Description of Artificial Sequence: Synthetic polypeptide"
MAADGYLPDWLEDNLSEGIREWWALKPGAPKPKANQQKQDDGRGLVLPGYKYLGPFNGLDKGEPVNAADAAALEHDKAYDQQLQAGDNPYLRYNHADAEFQERLQEDTSFGGNLGRAVFQAKKWVLEPLGLVEEGAKTAPGKKRPVEQSPQEPDSSSGIGKTGQQPAKKRLNFGQTGDSESVPDPQPLGEPPATPAAVGPTTMASGGGAPMADNNEGADGVGNASGNWHCDSTWLGDRVITTSTRTWALPTYNNHLYKQISSASTGASNDNHYFGYSTPWGYFDFNRFHCHFSPRDWQRLINNNWGFRPKRLNFKLFNIQVKEVTTNDGVTTIANNLTSTVQVFSDSEYQLPYVLGSAHQGCLPPFPADVFMIPQYGYLTLNNGSQAVGRSSFYCLEYFPSQMLRTGNNFTFSYTFEEVPFHSSYAHSQSLDRLMNPLIDQYLYYLNRTQNQSGSAQNKDLLFSRGSPAGMSVQPKNWLPGPCYRQQRVSKTKTDNNNSNFTWTGASKYNLNGRESIINPGTAMASHKDDEDKFFPMSGVMIFGKESAGASNTALDNVMITDEEEIKATNPVATERFGTVAVNLQSSSTDPATGDVHVMGALPGMVWQDRDVYLQGPIWAKIPHTDGHFHPSPLMGGFGLKNPPPQILIKNTPVPANPPAEFSATKFASFITQYSTGQVSVEIEWELQKENSKRWNPEVQYTSNYAKSANVDFTVDNNGLYTEPRPIGTRYLTRPL

SEQ ID NO: 359 - DNA, 2214 bp, Artificial Sequence
  source: /note="Description of Artificial Sequence: Synthetic polynucleotide"
atggctgccgatggttatcttccagattggctcgaggacaaccttagtgaaggaattcgcgagtggtgggctttgaaacctggagcccctcaacccaaggcaaatcaacaacatcaagacaacgctcgaggtcttgtgcttccgggttacaaataccttggacccggcaacggactcgacaagggggagccggtcaacgcagcagacgcggcggccctcgagcacgacaaggcctacgaccagcagctgcaggcgggtgacaatccgtacctgcggtataaccacgccgacgccgagtttcaggagcgtctgcaagaagatacgtcttttgggggcaaccttggcagagcagtcttccaggccaaaaagaggatccttgagcctcttggtctggttgaggaagcagctaaaacggctcctggaaagaagaggcctgtagatcagtctcctcaggaaccggactcatcatctggtgttggcaaatcgggcaaacagcctgccagaaaaagactaaatttcggtcagactggcgactcagagtcagtcccagaccctcaacctctcggagaaccaccagcagcccccacaagtttgggatctaatacaatggcttcaggcggtggcgcaccaatggcagacaataacgagggtgccgatggggtgggtagttcctcgggaaattggcattgcgattcccaatggctgggggacagagtcatcaccaccagcacccgaacctgggccctgcccacctacaacaatcacctctacaagcaaatctccaacgggacatcgggaggagccaccaacgacaacacctacttcggctacagcaccccctgggggtattttgactttaacagattccactgccacttttcaccacgtgactggcagcgactcatcaacaacaactggggattccggcccaagagactcagcttcaagctcttcaacatccaggtcaaggaggtcacgcagaatgaaggcaccaagaccatcgccaataacctcaccagcaccatccaggtgtttacggactcggagtaccagctgccgtacgttctcggctcggcgcaccagggctgcctccctccgttcccggcggacgtcttcatggtgccacagtatggatacctgacgctcaacaatggcagccaagccgtgggacgttcatccttttactgcctggaatatttcccttctcagatgctgagaacgggcaacaactttaccttcagctacacctttgaggaagtgcctttccacagcagctacgcgcacagccagagcttggaccggctgatgaatcctctgattgaccagtacctgtactacttgtctcggactcaaacaacaggaggcacggcaaatacgcagactctgggcttcagccaaggtgggcctaatacaatggccaatcaggcaaagaactggctgccaggaccctgttaccgccaacaacgcgtctcaacgacaaccgggcaaaacaacaatagcaactttgcctggactgctgggaccaaataccatctgaatggaagaaattcattggctaatcctggcatcgctatggcaacacacaaagacgacgaggagcgtttttttcccagtaacgggatcctgatttttggcaaacaaaatgctgccagagacaatgcggattacagcgatgtcatgctcaccagcgaggaagaaatcaaaaccactaaccctgtggctacagaggaatacggtatcgtggcagataacttgcagcagcaaaacacggctcctcaaattggaactgtcaacagccagggggacttacccggtatggtctggcagaaccgggacgtgtacctgcagggtcccatctgggccaagattcctcacacggacggcaacttccacccgtctccgctgatgggcggctttggcctgaaacatcctccgcctcagatcctgatcaagaacacgcctgtacctgcggatcctccgaccaccttcaaccagtcaaagctgaactctttcatcacgcaatacagcaccggacaggtcagcgtggagatcgagtgggagctgcagaaggaaaacagcaagcgctggaacccggagatccagtacacttccaactattacaagtctaataatgttgaatttgctgttaatactgaaggtgtatatagtgaaccccgccccattggcaccagatacctgactcgtaatctgtaa

SEQ ID NO: 360 - protein, 737 aa, Artificial Sequence
  source: /note="Description of Artificial Sequence: Synthetic polypeptide"
MAADGYLPDWLEDNLSEGIREWWALKPGAPQPKANQQHQDNARGLVLPGYKYLGPGNGLDKGEPVNAADAAALEHDKAYDQQLQAGDNPYLRYNHADAEFQERLQEDTSFGGNLGRAVFQAKKRILEPLGLVEEAAKTAPGKKRPVDQSPQEPDSSSGVGKSGKQPARKRLNFGQTGDSESVPDPQPLGEPPAAPTSLGSNTMASGGGAPMADNNEGADGVGSSSGNWHCDSQWLGDRVITTSTRTWALPTYNNHLYKQISNGTSGGATNDNTYFGYSTPWGYFDFNRFHCHFSPRDWQRLINNNWGFRPKRLSFKLFNIQVKEVTQNEGTKTIANNLTSTIQVFTDSEYQLPYVLGSAHQGCLPPFPADVFMVPQYGYLTLNNGSQAVGRSSFYCLEYFPSQMLRTGNNFTFSYTFEEVPFHSSYAHSQSLDRLMNPLIDQYLYYLSRTQTTGGTANTQTLGFSQGGPNTMANQAKNWLPGPCYRQQRVSTTTGQNNNSNFAWTAGTKYHLNGRNSLANPGIAMATHKDDEERFFPSNGILIFGKQNAARDNADYSDVMLTSEEEIKTTNPVATEEYGIVADNLQQQNTAPQIGTVNSQGDLPGMVWQNRDVYLQGPIWAKIPHTDGNFHPSPLMGGFGLKHPPPQILIKNTPVPADPPTTFNQSKLNSFITQYSTGQVSVEIEWELQKENSKRWNPEIQYTSNYYKSNNVEFAVNTEGVYSEPRPIGTRYLTRNL

SEQ ID NO: 361 - DNA, 2205 bp, Artificial Sequence
  source: /note="Description of Artificial Sequence: Synthetic polynucleotide"
atggctgctgacggttatcttccagattggctcgaggacaacctttctgaaggcattcgtgagtggtgggctctgaaacctggagtccctcaacccaaagcgaaccaacaacaccaggacaactgtcggggtcttgtgcttccgggttacaaatacctcggacccggtaacggactcgacaaaggagagccggtcaacgaggcggacgcggcagccctcgaacacgacaaggcctacgaccagcagctcaaggccggagacaacccgtacctcaagtacaaccacgccgacgccgagttccaggagcggctcaaagaagatacgtcttttgggggcaacctcgggcgagcagtcttccagaccaaaaagaggcttcttgaacctcttggtctggttgaggaagcggctaagacggctcctggaaagaagaggcctgtagagcagtctcctcaggaaccggactcctccgcgggtattggcaaatcgggtgcacagcccgctaaaaagagactcaatttcggtcagactggcgacacagagtcagtcccagaccctcaaccaatcggagaacctcccgcagccccctcaggtgtgggatctcttacaatggcttcaggtggtggcgcaccagtggcagacaataacgaaggtgccgatggagtgggtagttcctcgggaaattggcattgcgattcccaatggctgggggacagagtcatcaccaccagcacccgaacctgggccctgcccacctacaacaaccacctctacaaacaaatttccagccaatcaggagcctcgaacgacaatcactactttggctacagcaccccttgggggtattttgacttcaacagattccactgccacttttcaccacgtgactggcagcgactcatcaacaacaactggggattccggcccaagagactcagcttcaagctcttcaacatccaggtcaaagaggttacggacaacaatggagtcaagaccatcgccaataaccttaccagcacggtccaggtcttcacggactcagactatcagctcccgtacgtgctcgggtcggctcacgagggctgcctcccgccgttcccagcggacgttttcatgattcctcagtacgggtatctgacgcttaatgatggaagccaggccgtgggtcgttcgtccttttactgcctggaatatttcccgtcgcaaatgctaagaacgggtaacaacttccagttcagctacgagtttgagaacgtacctttccatagcagctacgctcacagccaaagcctggaccgactaatgaatccactcatcgaccaatacttgtactatctctcaaagactattaacggttctggacagaatcaacaaacgctaaaattcagtgtggccggacccagcaacatggctgtccagggaagaaactacatacctggacccagctaccgacaacaacgtgtctcaaccactgtgactcaaaacaacaacagcgaatttgcttggcctggagcttcttcttgggctctcaatggacgtaatagcttgatgaatcctggacctgctatggccagccacaaagaaggagaggaccgtttctttcctttgtctggatctttaatttttggcaaacaaggaactggaagagacaacgtggatgcggacaaagtcatgataaccaacgaagaagaaattaaaactactaacccggtagcaacggagtcctatggacaagtggccacaaaccaccagagtgcccaagcacaggcgcagaccggctgggttcaaaaccaaggaatacttccgggtatggtttggcaggacagagatgtgtacctgcaaggacccatctgggccaagattcctcacacggacggcaacttccacccgtctccgctgatgggcggctttggcctgaaacatcctccgcctcagatcctgatcaagaacacgcctgttcctgcgaatcctccggcggagttttcagctacaaagtttgcttcattcatcacccagtactccacaggacaagtgagtgtggaaattgaatgggagctgcagaaagaaaacagcaagcgctggaatcccgaagtgcagtacacatccaattatgcaaaatctgccaacgttgattttactgtggacaacaatggactttatactgagcctcgccccattggcacccgttaccttaccaaacctctgtaa

SEQ ID NO: 362 - protein, 734 aa, Artificial Sequence
  source: /note="Description of Artificial Sequence: Synthetic polypeptide"
MAADGYLPDWLEDNLSEGIREWWALKPGVPQPKANQQHQDNCRGLVLPGYKYLGPGNGLDKGEPVNEADAAALEHDKAYDQQLKAGDNPYLKYNHADAEFQERLKEDTSFGGNLGRAVFQTKKRLLEPLGLVEEAAKTAPGKKRPVEQSPQEPDSSAGIGKSGAQPAKKRLNFGQTGDTESVPDPQPIGEPPAAPSGVGSLTMASGGGAPVADNNEGADGVGSSSGNWHCDSQWLGDRVITTSTRTWALPTYNNHLYKQISSQSGASNDNHYFGYSTPWGYFDFNRFHCHFSPRDWQRLINNNWGFRPKRLSFKLFNIQVKEVTDNNGVKTIANNLTSTVQVFTDSDYQLPYVLGSAHEGCLPPFPADVFMIPQYGYLTLNDGSQAVGRSSFYCLEYFPSQMLRTGNNFQFSYEFENVPFHSSYAHSQSLDRLMNPLIDQYLYYLSKTINGSGQNQQTLKFSVAGPSNMAVQGRNYIPGPSYRQQRVSTTVTQNNNSEFAWPGASSWALNGRNSLMNPGPAMASHKEGEDRFFPLSGSLIFGKQGTGRDNVDADKVMITNEEEIKTTNPVATESYGQVATNHQSAQAQAQTGWVQNQGILPGMVWQDRDVYLQGPIWAKIPHTDGNFHPSPLMGGFGLKHPPPQILIKNTPVPANPPAEFSATKFASFITQYSTGQVSVEIEWELQKENSKRWNPEVQYTSNYAKSANVDFTVDNNGLYTEPRPIGTRYLTKPL

SEQ ID NO: 363 - DNA, 2211 bp, Artificial Sequence
  source: /note="Description of Artificial Sequence: Synthetic polynucleotide"
atggctgccgatggttatcttccagattggctcgaggacaacctctctgagggcattcgcgagtggtgggacttgaaacctggagcccctaaacccaaggcaaatcaacaacatcaggacaacgctcgaggtcttgtgcttccgggttacaaataccttggacccggcaacggactcgacaagggggagccggtcaacgcagcagacgcggcggccctcgagcacgacaaggcctacgaccagcagctcaaggccggagacaacccgtacctcaagtacaaccacgccgacgccgagttccaggagcggctcaaagaagatacgtcttttgggggcaacctcgggcgagcagtcttccaggccaaaaagaggcttcttgaacctcttggtctggttgaggaagcggctaagacggctcctggaaagaagagaccggtagagccatcaccccagcgttctccagactcctctacgggcatcggcaagaaaggccaacagcccgctaaaaagagactcaattttggtcagactggcgactcagagtcagtccccgacccacaacctctcggagaacctccagcaacccccgctgctgtgggacctactacaatggcttcaggcggtggcgcaccaatggcagacaataacgagggtgccgatggagtgggtaattcctcaggaaattggcattgcgattcccaatggctgggcgacagagtcatcaccaccagcaccagaacctgggccctgcccacttacaacaaccatctctacaagcaaatctccagccaatcaggagcttcaaacgacaaccactactttggctacagcaccccttgggggtattttgactttaacagattccactgccacttttcaccacgtgactggcaaagactcatcaacaacaactggggattccgacccaagagactcaacttcaagctcttcaacatccaagtcaaggaggtcacgacgaatgatggcgtcacgaccatcgctaataaccttaccagcacggttcaagtcttctcggactcggagtaccagttgccgtacgtcctcggctctgcgcaccagggctgcctccctccgttcccggcggacgtgttcatgattccgcagtacggctacctaacgctcaacaatggcagccaagccgtgggacgttcatccttttactgcctggaatatttcccttctcagatgctgagaacgggcaacaactttaccttcagctacacttttgaggacgttcctttccacagcagctacgctcacagccagagtctggaccgtctcatgaatcctctcatcgaccagtacctgtattacttgagcagaacaaacactccaagtggaaccaccacgcagtcaaggcttcagttttctcaggccggagcgagtgacattcgggaccagtctaggaactggcttcctggaccctgttaccgccagcagcgcgtttctaaaacaaaaacagacaacaacaacagcaattttacctggactggtgcttcaaaatataaccttaatgggcgtgaatctataatcaaccctggcactgctatggcctcacacaaagacgacgaagacaagttctttcccatgagcggtgtcatgatttttggaaaagagagcgccggagcttcaaacactgcattggacaatgtcatgatcacagacgaagaggaaatcaaagccactaaccccgtggccaccgaaagatttgggactgtggcagtcaatctccagagcagcagcacagaccctgcgaccggagatgtgcatgttatgggagcattacctggcatggtgtggcaagatagagacgtgtacctgcagggtcccatttgggccaaaattcctcacacagatggacactttcacccgtctcctcttatgggcggctttggactcaagaacccgcctcctcagatcctcatcaaaaacacgcctgttcctgcgaatcctccggcggagttttcagctacaaagtttgcttcattcatcacccaatactccacaggacaagtgagtgtggaaattgaatgggagctgcagaaagaaaacagcaagcgctggaatcccgaagtgcagtacacatccaattatgcaaaatctgccaacgttgattttactgtggacaacaatggactttatactgagcctcgccccattggcacccgttaccttacccgtcccctgtaa

SEQ ID NO: 364 - protein, 736 aa, Artificial Sequence
  source: /note="Description of Artificial Sequence: Synthetic polypeptide"
MAADGYLPDWLEDNLSEGIREWWDLKPGAPKPKANQQHQDNARGLVLPGYKYLGPGNGLDKGEPVNAADAAALEHDKAYDQQLKAGDNPYLKYNHADAEFQERLKEDTSFGGNLGRAVFQAKKRLLEPLGLVEEAAKTAPGKKRPVEPSPQRSPDSSTGIGKKGQQPAKKRLNFGQTGDSESVPDPQPLGEPPATPAAVGPTTMASGGGAPMADNNEGADGVGNSSGNWHCDSQWLGDRVITTSTRTWALPTYNNHLYKQISSQSGASNDNHYFGYSTPWGYFDFNRFHCHFSPRDWQRLINNNWGFRPKRLNFKLFNIQVKEVTTNDGVTTIANNLTSTVQVFSDSEYQLPYVLGSAHQGCLPPFPADVFMIPQYGYLTLNNGSQAVGRSSFYCLEYFPSQMLRTGNNFTFSYTFEDVPFHSSYAHSQSLDRLMNPLIDQYLYYLSRTNTPSGTTTQSRLQFSQAGASDIRDQSRNWLPGPCYRQQRVSKTKTDNNNSNFTWTGASKYNLNGRESIINPGTAMASHKDDEDKFFPMSGVMIFGKESAGASNTALDNVMITDEEEIKATNPVATERFGTVAVNLQSSSTDPATGDVHVMGALPGMVWQDRDVYLQGPIWAKIPHTDGHFHPSPLMGGFGLKNPPPQILIKNTPVPANPPAEFSATKFASFITQYSTGQVSVEIEWELQKENSKRWNPEVQYTSNYAKSANVDFTVDNNGLYTEPRPIGTRYLTRPL

SEQ ID NO: 365 - DNA, 2214 bp, Artificial Sequence; identical to SEQ ID NO: 337
  source: /note="Description of Artificial Sequence: Synthetic polynucleotide"

SEQ ID NO: 366 - protein, 737 aa, Artificial Sequence; identical to SEQ ID NO: 338
  source: /note="Description of Artificial Sequence: Synthetic polypeptide"

SEQ ID NO: 367 - DNA, 2205 bp, Artificial Sequence
  source: /note="Description of Artificial Sequence: Synthetic polynucleotide"
atggctgctgacggttatcttccagattggctcgaggacaacctttctgaaggcattcgtgagtggtgggctctgaaacctggagtccctcaacccaaagcgaaccaacaacaccaggacaaccgtcggggtcttgtgcttccgggttacaaatacctcggacccggtaacggactcgacaaaggagagccggtcaacgaggcggacgcggcagccctcgaacacgacaaggcctacgaccagcagctcaaggccggagacaacccgtacctcaagtacaaccacgccgacgccgagttccaggagcggctcaaagaagatacgtcttttgggggcaacctcgggcgagcagtcttccaggccaaaaagaggcttcttgaacctcttggtctggttgaggaagcggctaagacggctcctggaaagaagaggcctgtagagcagtctcctcaggaaccggactcctccgcgggtattggcaaatcgggtgcacagcccgctaaaaagagactcaatttcggtcagactggcgacacagagtcagtcccagaccctcaaccaatcggagaacctcccgcagccccctcaggtgtgggatctcttacaatggcttcaggtggtggcgcaccagtggcagacaataacgaaggtgccgatggagtgggtagttcctcgggaaattggcattgcgattcccaatggctgggggacagagtcatcaccaccagcacccgaacctgggccctgcccacctacaacaaccacctctacaaacaaatttccagccaatcaggagcctcgaacgacaatcactactttggctacagcaccccttgggggtattttgacttcaacagattccactgccacttttcaccacgtgactggcagcgactcatcaacaacaactggggattccggcccaagagactcagcttcaagctcttcaacatccaggtcaaagaggttacggacaacaatggagtcaagaccatcgccaataaccttaccagcacggtccaggtcttcacggactcagactatcagctcccgtacgtgctcgggtcggctcacgagggctgcctcccgccgttcccagcggacgttttcatgattcctcagtacgggtatctgacgcttaatgatggaagccaggccgtgggtcgttcgtccttttactgcctggaatatttcccgtcgcaaatgctaagaacgggtaacaacttccagttcagctacgagtttgagaacgtacctttccatagcagctacgctcacagccaaagcctggaccgactaatgaatccactcatcgaccaatacttgtactatctctcaaagactattaacggttctggacagaatcaacaaacgctaaaattcagtgtggccggacccagcaacatggctgtccagggaagaaactacatacctggacccagctaccgacaacaacgtgtctcaaccactgtgactcaaaacaacaacagcgaatttgcttggcctggagcttcttcttgggctctcaatggacgtaatagcttgatgaatcctggacctgctatggccagccacaaagaaggagaggaccgtttctttcctttgtctggatctttaatttttggcaaacaaggaactggaagagacaacgtggatgcggacaaagtcatgataaccaacgaagaagaaattaaaactactaacccggtagcaacggagtcctatggacaagtggccacaaaccaccagagtgcccaagcacaggcgcagaccggctgggttcaaaaccaaggaatacttccgggtatggtttggcaggacagagatgtgtacctgcaaggacccatttgggccaaaattcctcacacggacggcaactttcacccttctccgctgatgggagggtttggaatgaaacacccgcctcctcagatcctcatcaaaaacacacctgtacctgcggatcctccaacggccttcaacaaggacaagctgaactctttcatcacccagtattctactggccaagtcagcgtggagatcgagtgggagctgcagaaggaaaacagcaagcgctggaaccccgagatccagtacacctccaactactacaaatctacaagtgtggactttgctgttaatacagaaggcgtgtactctgaaccccgccccattggcacccgttacctcacccgtaatctgtaa

SEQ ID NO: 368 - protein, 734 aa, Artificial Sequence
  source: /note="Description of Artificial Sequence: Synthetic polypeptide"
MAADGYLPDWLEDNLSEGIREWWALKPGVPQPKANQQHQDNRRGLVLPGYKYLGPGNGLDKGEPVNEADAAALEHDKAYDQQLKAGDNPYLKYNHADAEFQERLKEDTSFGGNLGRAVFQAKKRLLEPLGLVEEAAKTAPGKKRPVEQSPQEPDSSAGIGKSGAQPAKKRLNFGQTGDTESVPDPQPIGEPPAAPSGVGSLTMASGGGAPVADNNEGADGVGSSSGNWHCDSQWLGDRVITTSTRTWALPTYNNHLYKQISSQSGASNDNHYFGYSTPWGYFDFNRFHCHFSPRDWQRLINNNWGFRPKRLSFKLFNIQVKEVTDNNGVKTIANNLTSTVQVFTDSDYQLPYVLGSAHEGCLPPFPADVFMIPQYGYLTLNDGSQAVGRSSFYCLEYFPSQMLRTGNNFQFSYEFENVPFHSSYAHSQSLDRLMNPLIDQYLYYLSKTINGSGQNQQTLKFSVAGPSNMAVQGRNYIPGPSYRQQRVSTTVTQNNNSEFAWPGASSWALNGRNSLMNPGPAMASHKEGEDRFFPLSGSLIFGKQGTGRDNVDADKVMITNEEEIKTTNPVATESYGQVATNHQSAQAQAQTGWVQNQGILPGMVWQDRDVYLQGPIWAKIPHTDGNFHPSPLMGGFGMKHPPPQILIKNTPVPADPPTAFNKDKLNSFITQYSTGQVSVEIEWELQKENSKRWNPEIQYTSNYYKSTSVDFAVNTEGVYSEPRPIGTRYLTRNL

SEQ ID NO: 369 - DNA, 2217 bp, Artificial Sequence
  source: /note="Description of Artificial Sequence: Synthetic polynucleotide"
atggctgccgatggttatcttccagattggctcgaggacaacctctctgagggcattcgcgagtggtgggcgctgaaacctggagccccgaagcccaaagccaaccagcaaaagcaggacgacggccggggtctggtgcttcctggctacaagtacctcggacccttcaacggactcgacaagggggagcccgtcaacgcggcggacgcagcggccctcgagcacgacaaggcctacgaccagcagctgcaggcgggtgacaatccgtacctgcggtataaccacgccgacgccgagtttcaggagcgtctgcaagaagatacgtcttttgggggcaacctcgggcgagcagtcttccaggccaagaagcgggttctcgaacctctcggtctggttgaggaaggcgctaagacggctcctggaaagaagagaccggtagagccatcaccccagcgttctccagactcctctacgggcatcggcaagaaaggccaacagcccgccagaaaaagactcaattttggtcagactggcgactcagagtcagttccagaccctcaacctctcggagaacctccagcagcgccctctggtgtgggacctaatacaatggctgcaggcggtggcgcaccaatggcagacaataacgaaggcgccgacggagtgggtagttcctcgggaaattggcattgcgattccacatggctgggcgacagagtcatcaccaccagcacccgaacctgggccctgcccacctacaacaaccacctctacaagcaaatctccaacgggacatcgggaggagccaccaacgacaacacctacttcggctacagcaccccctgggggtattttgactttaacagattccactgccacttttcaccacgtgactggcagcgactcatcaacaacaactggggattccggcccaagagactcagcttcaagctcttcaacatccaggtcaaggaggtcacgcagaatgaaggcaccaagaccatcgccaataacctcaccagcaccatccaggtgtttacggactcggagtaccagctgccgtacgttctcggctctgcccaccagggctgcctgcctccgttcccggcggacgtgttcatgattccccagtacggctacctaacactcaacaacggtagtcaggccgtgggacgctcctccttctactgcctggaatactttccttcgcagatgctgagaaccggcaacaacttccagtttacttacaccttcgaggacgtgcctttccacagcagctacgcccacagccagagcttggaccggctgatgaatcctctgattgaccagtacctgtactacttgtctcggactcaaacaacaggaggcacggcaaatacgcagactctgggcttcagccaaggtgggcctaatacaatggccaatcaggcaaagaactggctgccaggaccctgttaccgccaacaacgcgtctcaacgacaaccgggcaaaacaacaatagcaactttgcctggactgctgggaccaaataccatctgaatggaagaaattcattggctaatcctggcatcgctatggcaacacacaaagacgacgaggagcgtttttttcccagtaacgggatcctgatttttggcaaacaaaatgctgccagagacaatgcggattacagcgatgtcatgctcaccagcgaggaagaaatcaaaaccactaaccctgtggctacagaggaatacggtatcgtggcagataacttgcagcagcaaaacacggctcctcaaattggaactgtcaacagccagggggccttacccggtatggtctggcagaaccgggacgtgtacctgcagggtcccatctgggccaagattcctcacacggacggcaacttccacccctctcccctcatgggtggattcggacttaaacatcctccgcctcagatcctgatcaagaacacgcctgtacctgcggatcctccgaccaccttcaaccagtcaaagctgaactctttcatcacgcaatacagcaccggacaggtcagcgtggaaattgaatgggagctgcagaaggaaaacagcaagcgctggaaccccgagatccagtacacctccaactactacaaatctacaagtgtggactttgctgttaatacagaaggcgtgtactctgaaccccgccccattggcacccgttacctcacccgtaatctgtaa

SEQ ID NO: 370 - protein, 738 aa, Artificial Sequence; identical to SEQ ID NO: 116
  source: /note="Description of Artificial Sequence: Synthetic polypeptide"

SEQ ID NO: 371 - DNA, 2211 bp, Artificial Sequence
  source: /note="Description of Artificial Sequence: Synthetic polynucleotide"
atggctgctgacggttatcttccagattggctcgaggacaacctttctgaaggcattcgagagtggtgggcgctgcaacctggagcccctaaacccaaggcaaatcaacaacatcaggacaacgctcggggtcttgtgcttccgggttacaaatacctcggacccggcaacggactcgacaagggggaacccgtcaacgcagcggacgcggcagccctcgagcacgacaaggcctacgaccagcagctcaaggccggtgacaacccctacctcaagtacaaccacgccgacgccgagttccaggagcggctcaaagaagatacgtcttttgggggcaacctcgggcgagcagtcttccaggccaaaaagaggcttcttgaacctcttggtctggttgaggaagcggctaagacggctcctggaaagaagaggcctgtagatcagtctcctcaggaaccggactcatcatctggtgttggcaaatcgggcaaacagcctgccagaaaaagactaaatttcggtcagactggcgactcagagtcagtcccagaccctcaacctctcggagaaccaccagcagcccccacaagtttgggatctaatacaatggcttcaggcggtggcgcaccaatggcagacaataacgagggtgccgatggagtgggtaattcctcaggaaattggcattgcgattcccaatggctgggcgacagagtcatcaccaccagcaccagaacctgggccctgcccacttacaacaaccatctctacaagcaaatctccagccaatcaggagcttcaaacgacaaccactactttggctacagcaccccttgggggtattttgactttaacagattccactgccacttctcaccacgtgactggcagcgactcattaacaacaactggggattccggcccaagaaactcagcttcaagctcttcaacatccaagttaaagaggtcacgcagaacgatggcacgacgactattgccaataaccttaccagcacggttcaggtgtttacggactcggagtatcagctcccgtacgtgctcgggtcggcgcaccaaggctgtctcccgccgtttccagcggacgtcttcatggtccctcagtatggatacctcaccctgaacaacggaagtcaagcggtgggacgctcatccttttactgcctggagtacttcccttcgcagatgctaaggactggaaataacttccaattcagctataccttcgaggatgtaccttttcacagcagctacgctcacagccagagtttggatcgcttgatgaatcctcttattgatcagtatctgtactacctgaacagaacgcaaggaacaacctctggaacaaccaaccaatcacggctgctttttagccaggctgggcctcagtctatgtctttgcaggccagaaattggctacctgggccctgctaccggcaacagagactttcaaagactgctaacgacaacaacaacagtaactttccttggacagcggccagcaaatatcatctcaatggccgcgactcgctggtgaatccaggaccagctatggccagtcacaaggacgatgaagaaaaatttttccctatgcacggcaatctaatatttggcaaagaagggacaacggcaagtaacgcagaattagataatgtaatgattacggatgaagaagagattcgtaccaccaatcctgtggcaacagagcagtatggaactgtggcaaataacttgcagagctcaaatacagctcccacgactagaactgtcaatgatcagggggccttacctggcatggtgtggcaagatcgtgacgtgtaccttcaaggacctatctgggcaaagattcctcacacggatggacactttcatccttctcctctgatgggaggctttggactgaaacatccgcctcctcaaatcatgatcaaaaatactccggtaccggcaaatcctccgacgactttcagcccggccaagtttgcttcatttatcactcagtactccactggacaggtcagcgtggaaattgagtgggagctacagaaagaaaacagcaaacgttggaatccagagattcagtacacttccaactacaacaagtctgttaatgtggactttactgtagacactaatggtgtttatagtgaacctcgccccattggcacccgttaccttacccgtcccctgtaa

SEQ ID NO: 372 - protein, 736 aa, Artificial Sequence; identical to SEQ ID NO: 342
  source: /note="Description of Artificial Sequence: Synthetic polypeptide"

SEQ ID NO: 373 - DNA, 2211 bp, Artificial Sequence; identical to SEQ ID NO: 341
  source: /note="Description of Artificial Sequence: Synthetic polynucleotide"

SEQ ID NO: 374 - protein, 736 aa, Artificial Sequence; identical to SEQ ID NO: 342
  source: /note="Description of Artificial Sequence: Synthetic polypeptide"

SEQ ID NO: 375 - DNA, 2211 bp, Artificial Sequence
  source: /note="Description of Artificial Sequence: Synthetic polynucleotide"
atggctgctgacggttatcttccagattggctcgaggacaacctttctgaaggcattcgtgagtggtgggctctgaaacctggagtccctcaacccaaagcgaaccaacaacaccaggacaaccgtcggggtcttgtgcttccgggttacaaatacctcggacccggtaacggactcgacaaaggagagcccgtcaacgcggcggatgcagcggccctcgagcacgacaaggcctacgaccagcagctcaaagcgggtgacaatccgtacctgcggtataaccacgccgacgccgagtttcaggagcgtctgcaagaagatacgtcttttgggggcaacctcgggcgagcagtcttccaggccaagaagagggttctcgaaccttttggtctggttgaggaaggtgctaagacggctcctggaaagaaacgtccggtagagcagtcgccacaagagccagactcctcctcgggcatcggcaagacaggccagcagcccgctaaaaagagactcaattttggtcagactggcgactcagagtcagtccccgacccacaacctctcggagaacctccagcaacccccgctgctgtgggacctactacaatggcttcaggcggtggcgcaccaatggcagacaataacgaaggcgccgacggagtgggtaatgcctcaggaaattggcattgcgattccacatggctgggcgacagagtcatcaccaccagcacccgcacctgggccttgcccacctacaataaccacctctacaagcaaatctccagtgcttcaacgggggccagcaacgacaaccactacttcggctacagcaccccctgggggtattttgatttcaacagattccactgccatttctcaccacgtgactggcagcgactcatcaacaacaattggggattccggcccaagagactcaacttcaagctcttcaacatccaagtcaaggaggtcacgacgaatgatggcgtcacgaccatcgctaataaccttaccagcacggttcaagtcttctcggactcggagtaccagcttccgtacgtcctcggctctgcgcaccagggctgcctccctccgttcccggcggacgtgttcatgattccgcaatacggctacctgacgctcaacaatggcagccaagccgtgggacgttcatccttttactgcctggaatatttcccttctcagatgctgagaacgggcaacaactttaccttcagctacacctttgaggaagtgcctttccacagcagctacgcgcacagccagagcctggaccggctgatgaatcctctcatcgaccaatacctgtattacctgaacagaactcaaaatcagtccggaagtgcccaaaacaaggacttgctgtttagccgtgggtctccagctggcatgtctgttcagcccaaaaactggctacctggaccctgttatcggcagcagcgcgtttctaaaacaaaaacagacaacaacaacagcaattttacctggactggtgcttcaaaatataacctcaatgggcgtgaatccatcatcaaccctggcactgctatggcctcacacaaagacgacgaagacaagttctttcccatgagcggtgtcatgatttttggaaaagagagcgccggagcttcaaacactgcattggacaatgtcatgattacagacgaagaggaaattaaagccactaaccctgtggccaccgaaagatttgggaccgtggcagtcaatttccagagcagcagcacagaccctgcgaccggagatgtgcatgttatgggagccttacctggaatggtgtggcaagacagagacgtatacctgcagggtcctatttgggccaaaattcctcacacggatggacactttcacccgtctcctctcatgggcggctttggacttaagcacccgcctcctcagatcctcatcaaaaacacgcctgttcctgcgaatcctccggcagagttttcggctacaaagtttgcttcattcatcacccagtattccacaggacaagtgagcgtggagattgaatgggagctgcagaaagaaaacagcaaacgctggaatcccgaagtgcagtatacatctaactatgcaaaatctgccaacgttgatttcactgtggacaacaatggactttatactgagcctcgccccattggcacccgttacctcacccgtcccctgtaa

SEQ ID NO: 376 - protein, 736 aa, Artificial Sequence
  source: /note="Description of Artificial Sequence: Synthetic polypeptide"
MAADGYLPDWLEDNLSEGIREWWALKPGVPQPKANQQHQDNRRGLVLPGYKYLGPGNGLDKGEPVNAADAAALEHDKAYDQQLKAGDNPYLRYNHADAEFQERLQEDTSFGGNLGRAVFQAKKRVLEPFGLVEEGAKTAPGKKRPVEQSPQEPDSSSGIGKTGQQPAKKRLNFGQTGDSESVPDPQPLGEPPATPAAVGPTTMASGGGAPMADNNEGADGVGNASGNWHCDSTWLGDRVITTSTRTWALPTYNNHLYKQISSASTGASNDNHYFGYSTPWGYFDFNRFHCHFSPRDWQRLINNNWGFRPKRLNFKLFNIQVKEVTTNDGVTTIANNLTSTVQVFSDSEYQLPYVLGSAHQGCLPPFPADVFMIPQYGYLTLNNGSQAVGRSSFYCLEYFPSQMLRTGNNFTFSYTFEEVPFHSSYAHSQSLDRLMNPLIDQYLYYLNRTQNQSGSAQNKDLLFSRGSPAGMSVQPKNWLPGPCYRQQRVSKTKTDNNNSNFTWTGASKYNLNGRESIINPGTAMASHKDDEDKFFPMSGVMIFGKESAGASNTALDNVMITDEEEIKATNPVATERFGTVAVNFQSSSTDPATGDVHVMGALPGMVWQDRDVYLQGPIWAKIPHTDGHFHPSPLMGGFGLKHPPPQILIKNTPVPANPPAEFSATKFASFITQYSTGQVSVEIEWELQKENSKRWNPEVQYTSNYAKSANVDFTVDNNGLYTEPRPIGTRYLTRPL

SEQ ID NO: 377 - DNA, 2217 bp, Artificial Sequence
  source: /note="Description of Artificial Sequence: Synthetic polynucleotide"
atggctgccgatggttatcttccagattggctcgaggacaacctctctgagggcattcgcgagtggtgggacttgaaacctggagccccgaaacccaaagccaaccagcaaaagcaggacgacggccggggtctggtgcttcctggctacaagtacctcggacccttcaacggactcgacaagggggagcccgtcaacgcggcggatgcaacggccctcgagcacgacaaggcctacgaccagcagctgcaggcgggtgacaatccgtacctgcggtataaccacgccgacgccgagtttcaggagcgtctgcaagaagatacgtcttttgggggcaacctcgggcgagcagtcttccaggccaagaagcgggttctcgaacctctcggtctggttgaggaaggcgctaagacggctcctggaaagaagagaccggtagagccatcaccccagcgttctccagactcctctacgggcatcggcaagaaaggccaacagcccgccagaaaaagactcaattttggtcagactggcgactcagagtcagttccagaccctcaacctctcggagaaccaccagcagcccccacaagtttgggatctaatacaatggcttcaggcggtggcgcaccaatggcagacaataacgagggtgccgatggagtgggtaattcctcaggaaattggcattgcgattcccaatggctgggcgacagagtcatcaccaccagcacccgcacctgggccttgcccacctacaataaccacctctacaagcaaatctccagtgcttcaacgggggccagcaacgacaaccactacttcggctacagcaccccctgggggtattttgactttaaccgcttccactgccacttctcgccaagagactggcaaagactcatcaacaacaattggggattccggcccaagagactcaacttcaaactcttcaacatccaagtcaaggaggtcacgacgaatgatggcgtcacgaccatcgccaataacctcaccagcaccatccaggtgtttacggactcggagtaccagctgccgtacgttctcggctctgcccaccagggctgcctgcctccgttcccggcggacgtgttcatgattccccagtatggatacctcaccctgaacaacggaagtcaagcggtgggacgctcatccttttactgcctggagtacttcccttcgcagatgctaaggactggaaataacttccaattcagctataccttcgaggatgtaccttttcacagcagctacgctcacagccagagtttggatcgcttgatgaatcctcttattgatcagtatctgtactacctgaacagaacgcaaggaacaacctctggaacaaccaaccaatcacggctgctttttagccaggctgggcctcagtctatgtctttgcaggccagaaattggctacctgggccctgctaccggcaacagagactttcaaagactgctaacgacaacaacaacagtaactttccttggacagcagccagcaaatatcatctcaatggccgcgactcgctggtgaatccaggaccagctatggccagtcacaaggacgatgaagaaaaatttttccctatgcacggcaatctaatatttggcaaagaagggacaacggcaagtaacgcagaattagataatgtaatgattacggatgaagaagagattcgtaccaccaatcctgtggcaacagagcagtatggaactgtggcaaataacttgcagagctcaaatacagctcccacgactagaactgtcaatgatcagggggccttacctggcatggtgtggcaagatcgtgacgtgtaccttcaggggcccatctgggcaaagattccacacacggacggacattttcacccctctcccctcatgggtggattcggacttaaacaccctcctccgcagattctcatcaagaacaccccggtacctgcgaatccttcgaccaccttcagtgcggcaaagtttgcttccttcatcacacagtactccacgggacaggtcagcgtggagatcgagtgggagctgcagaaggaaaacagcaagcgctggaacccggagatccagtacacttccaactattacaagtctaataatgttgaatttgctgttaatactgaaggtgtatatagtgaaccccgccccattggcaccagatacctgactcgtaatctgtaa

SEQ ID NO: 378 - protein, 738 aa, Artificial Sequence
  source: /note="Description of Artificial Sequence: Synthetic polypeptide"
MAADGYLPDWLEDNLSEGIREWWDLKPGAPKPKANQQKQDDGRGLVLPGYKYLGPFNGLDKGEPVNAADATALEHDKAYDQQLQAGDNPYLRYNHADAEFQERLQEDTSFGGNLGRAVFQAKKRVLEPLGLVEEGAKTAPGKKRPVEPSPQRSPDSSTGIGKKGQQPARKRLNFGQTGDSESVPDPQPLGEPPAAPTSLGSNTMASGGGAPMADNNEGADGVGNSSGNWHCDSQWLGDRVITTSTRTWALPTYNNHLYKQISSASTGASNDNHYFGYSTPWGYFDFNRFHCHFSPRDWQRLINNNWGFRPKRLNFKLFNIQVKEVTTNDGVTTIANNLTSTIQVFTDSEYQLPYVLGSAHQGCLPPFPADVFMIPQYGYLTLNNGSQAVGRSSFYCLEYFPSQMLRTGNNFQFSYTFEDVPFHSSYAHSQSLDRLMNPLIDQYLYYLNRTQGTTSGTTNQSRLLFSQAGPQSMSLQARNWLPGPCYRQQRLSKTANDNNNSNFPWTAASKYHLNGRDSLVNPGPAMASHKDDEEKFFPMHGNLIFGKEGTTASNAELDNVMITDEEEIRTTNPVATEQYGTVANNLQSSNTAPTTRTVNDQGALPGMVWQDRDVYLQGPIWAKIPHTDGHFHPSPLMGGFGLKHPPPQILIKNTPVPANPSTTFSAAKFASFITQYSTGQVSVEIEWELQKENSKRWNPEIQYTSNYYKSNNVEFAVNTEGVYSEPRPIGTRYLTRNL

SEQ ID NO: 379 - DNA, 2208 bp, Artificial Sequence
  source: /note="Description of Artificial Sequence: Synthetic polynucleotide"
atggctgccgatggttatcttccagattggctcgaggacaaccttagtgaaggaattcgcgagtggtgggacttgaaacctggagccccgaagcccaaagccaaccagcaaaagcaggacgacggccggggtctggtgcttcctggctacaagtacctcggacccttcaacggactcgacaagggggagcccgtcaacgcggcggacgcagcggccctcgagcacgacaaggcctacgaccagcagctcaaagcgggtgacaatccgtacctgcggtataaccacgccgacgccgagtttcaggagcgtctgcaagaagatacgtcttttgggggcaacctcgggcgagcagtcttccaggccaagaagcgggttctcgaacctctcggtctggttgaggaaggtgctaagacggctcctggaaagaaacgtccggtagagcagtcgccacaagagccagactcctcctcgggcattggcaagacaggccagcagcccgctaaaaagagactcaattttggtcagactggcgactcagagtcagtccccgacccacaacctctcggagaacctccagcaacccccgctgctgtgggacctactacaatggcttcaggcggtggcgcaccaatggcagacaataacgaaggcgccgacggagtgggtaatgcctcaggaaattggcattgcgattccacatggctgggcgacagagtcatcaccaccagcacccgaacctgggccctgcccacctacaacaaccacctctacaaacaaatttccagccaatcaggagcctcgaacgacaatcactactttggctacagcaccccttgggggtattttgatttcaacagattccactgccacttttcaccacgtgactggcagcgactcatcaacaacaattggggattccggcccaagagactcagcttcaagctcttcaacatccaggtcaaggaggtcacgcagaatgaaggcaccaagaccatcgccaataaccttaccagcacggttcaagtgtttacggactcggagtatcagctcccgtacgtgctcggctcggcgcatcaaggatgcctcccgccgttcccagcagacgtcttcatggtgccacagtatggatacctcaccctgaacaacgggagtcaggcagtaggacgctcttcattttactgcctggagtactttccttctcagatgctgcgtaccggaaacaactttaccttcagctacacttttgaggacgttcctttccacagcagctacgctcacagccagagtctggaccgtctcatgaatcctctgattgaccagtacctgtattacttgagcagaacaaacactccaagtggaaccaccacgcagtcaaggcttcagttttctcaggccggagcgagtgacattcgggaccagtctaggaactggcttcctggaccctgttaccgccagcagcgagtatcaaagacatctgcggataacaacaacagtgaatactcgtggactggagctaccaagtaccacctcaatggcagagactctctggtgaatccgggcccggccatggcaagccacaaggactatgaagaaaagttttttcctcagagcggggttctcatctttgggaagcaaggctcagagaaaacaaatgtggacattgaaaaggtcatgattacagacgaagaggaaatcaggacaaccaatcccgtggctacggagcagtatggttctgtatctaccaacctccagagaggcaacagacaagcagctaccgcagatgtcaacacacaaggcgttcttccaggcatggtctggcaggacagagatgtgtaccttcaggggcccatctgggcaaagattccacacacggacggacattttcacccgtctccgctgatgggcggctttggcctgaaacatcctccgcctcagatcctgatcaagaacacgcctgtacctgcggatcctccgaccaccttcaaccagtcaaagctgaactctttcatcactcagtattctactggccaagtcagcgtggagatcgagtgggagctgcagaaggaaaacagcaagcgctggaaccccgagatccagtacacctccaactactacaaatctacaagtgtggactttgctgttaatacagaaggcgtgtactctgaaccccgccccattggcacccgttacctcacccgtaatctgtaa

SEQ ID NO: 380 - protein, 735 aa, Artificial Sequence
  source: /note="Description of Artificial Sequence: Synthetic polypeptide"
MAADGYLPDWLEDNLSEGIREWWDLKPGAPKPKANQQKQDDGRGLVLPGYKYLGPFNGLDKGEPVNAADAAALEHDKAYDQQLKAGDNPYLRYNHADAEFQERLQEDTSFGGNLGRAVFQAKKRVLEPLGLVEEGAKTAPGKKRPVEQSPQEPDSSSGIGKTGQQPAKKRLNFGQTGDSESVPDPQPLGEPPATPAAVGPTTMASGGGAPMADNNEGADGVGNASGNWHCDSTWLGDRVITTSTRTWALPTYNNHLYKQISSQSGASNDNHYFGYSTPWGYFDFNRFHCHFSPRDWQRLINNNWGFRPKRLSFKLFNIQVKEVTQNEGTKTIANNLTSTVQVFTDSEYQLPYVLGSAHQGCLPPFPADVFMVPQYGYLTLNNGSQAVGRSSFYCLEYFPSQMLRTGNNFTFSYTFEDVPFHSSYAHSQSLDRLMNPLIDQYLYYLSRTNTPSGTTTQSRLQFSQAGASDIRDQSRNWLPGPCYRQQRVSKTSADNNNSEYSWTGATKYHLNGRDSLVNPGPAMASHKDYEEKFFPQSGVLIFGKQGSEKTNVDIEKVMITDEEEIRTTNPVATEQYGSVSTNLQRGNRQAATADVNTQGVLPGMVWQDRDVYLQGPIWAKIPHTDGHFHPSPLMGGFGLKHPPPQILIKNTPVPADPPTTFNQSKLNSFITQYSTGQVSVEIEWELQKENSKRWNPEIQYTSNYYKSTSVDFAVNTEGVYSEPRPIGTRYLTRNL

SEQ ID NO: 381 - DNA, 2214 bp, Artificial Sequence
  source: /note="Description of Artificial Sequence: Synthetic polynucleotide"
atggctgccgatggttatcttccagattggctcgaggacaacctctctgagggcattcgcgagtggtgggacttgaaacctggagccccgaaacccaaagccaaccagcaaaagcaggacgacggccggggtctggtgcttcctggctacaagtacctcggacccttcaacggactcgacaagggggagcccgtcaacgcggcggatgcagcggccctcgagcacgacaaggcctacgaccagcagctcaaagcgggtgacaatccgtacctgcggtataaccacgccgacgccgagtttcaggagcgtctgcaagaagatacgtcttttgggggcaacctcgggcgagcagtcttccaggccaagaagagggttctcgaaccttttggtctggttgaggaaggtgctaagacggctcctggaaagaaacgtccggtagagcagtcgccacaagagccagactcctcctcgggcattggcaagacaggccagcagcctgcaagaaaaagattgaattttggtcagactggagacgcagactcagtacctgacccccagcctctcggacagccaccagcagccccctctggtctgggaactaatacgatggctacaggcagtggcgcaccaatggcagacaataacgagggcgccgacggagtgggtaattcctcgggaaattggcattgcgattcccaatggctgggggacagagtcatcaccaccagcacccgaacctgggccctgcccacctacaacaatcacctctacaagcaaatctccaacagcacatctggaggatcttcaaatgacaacgcctacttcggctacagcaccccctgggggtattttgatttcaacagattccactgccatttctcaccacgtgactggcagcgactcatcaacaacaattggggattccggcccaagagactcaacttcaagctcttcaacatccaggtcaaggaggtcacgcagaatgaaggcaccaagaccatcgccaataacctcaccagcaccatccaggtgtttacggactcggagtaccagctgccgtacgttctcggctctgcccaccagggctgcctgcctccgttcccggcggacgtgttcatgattccccagtacggctacctaacactcaacaacggtagtcaggccgtgggacgctcctccttctactgcctggaatactttccttcgcagatgctgagaaccggcaacaacttccagtttacttacaccttcgaggacgtgcctttccacagcagctacgcccacagccagagcttggaccggctgatgaatcctctgattgaccagtacctgtactacttgtctcggactcaaacaacaggaggcacgacaaatacgcagactctgggcttcagccaaggtgggcctaatacaatggccaatcaggcaaagaactggctgccaggaccctgttaccgccagcagcgagtatcaaagacatttgcggataacaacaacagtgaatactcgtggactggagctaccaagtaccacctcaatggcagagactctctggtgaatccgggcccggccatggcaagccacaaggacgatgaagaaaagttttttcctcagagcggggttctcatctttgggaagcaaggctcagagaaaacaaatgtggacattgaaaaggtcatgattacagacgaagaggaaatcaggacaaccaatcccgtggctacggagcagtatggttctgtatctaccaacctccagagaggcaacagacaagcagctaccgcagatgtcaacacacaaggcgttcttccaggcatggtctggcaggacagagatgtgtaccttcaggggcccatctgggcaaagattccacacacggacggacattttcacccctctcccctcatgggtggattcggacttaaacaccctccgcctcagatcctgatcaagaacacgcctgtacccgcggatcctccgaccaccttcaaccagtcaaagctgaactctttcatcacccagtattctactggccaagtcagcgtggagatcgagtgggagctgcagaaggaaaacagcaagcgctggaaccccgagatccagtacacctccaactactacaaatctacaagtgtggactttgctgttaatacagaaggcgtgtactctgaaccccgccccattggcacccgttacctcacccgtaatctgtaa

SEQ ID NO: 382 - protein, 737 aa, Artificial Sequence
  source: /note="Description of Artificial Sequence: Synthetic polypeptide"
MAADGYLPDWLEDNLSEGIREWWDLKPGAPKPKANQQKQDDGRGLVLPGYKYLGPFNGLDKGEPVNAADAAALEHDKAYDQQLKAGDNPYLRYNHADAEFQERLQEDTSFGGNLGRAVFQAKKRVLEPFGLVEEGAKTAPGKKRPVEQSPQEPDSSSGIGKTGQQPARKRLNFGQTGDADSVPDPQPLGQPPAAPSGLGTNTMATGSGAPMADNNEGADGVGNSSGNWHCDSQWLGDRVITTSTRTWALPTYNNHLYKQISNSTSGGSSNDNAYFGYSTPWGYFDFNRFHCHFSPRDWQRLINNNWGFRPKRLNFKLFNIQVKEVTQNEGTKTIANNLTSTIQVFTDSEYQLPYVLGSAHQGCLPPFPADVFMIPQYGYLTLNNGSQAVGRSSFYCLEYFPSQMLRTGNNFQFTYTFEDVPFHSSYAHSQSLDRLMNPLIDQYLYYLSRTQTTGGTTNTQTLGFSQGGPNTMANQAKNWLPGPCYRQQRVSKTFADNNNSEYSWTGATKYHLNGRDSLVNPGPAMASHKDDEEKFFPQSGVLIFGKQGSEKTNVDIEKVMITDEEEIRTTNPVATEQYGSVSTNLQRGNRQAATADVNTQGVLPGMVWQDRDVYLQGPIWAKIPHTDGHFHPSPLMGGFGLKHPPPQILIKNTPVPADPPTTFNQSKLNSFITQYSTGQVSVEIEWELQKENSKRWNPEIQYTSNYYKSTSVDFAVNTEGVYSEPRPIGTRYLTRNL

SEQ ID NO: 383 - DNA, 2217 bp, Artificial Sequence
  source: /note="Description of Artificial Sequence: Synthetic polynucleotide"
atggctgccgatggttatcttccagattggctcgaggacactctctctgaaggaataagacagtggtgggcgctgaaacctggagccccgaagcccaaagccaaccagcaaaagcaggacgacggccggggtctggtgcttcctggctacaagtacctcggacccttcaacggactcgacaagggggagcccgtcaacgcggcggatgcagcggccctcgagcacgacaaggcctacgaccagcagctcaaagcgggtgacaatccgtacctgcggtataaccacgccgacgccgagtttcaggagcgtctgcaagaagatacgtcttttgggggcaacctcgggcgagcagtcttccaggccaagaagcgggttctcgaacctctcggtctggttgaggaaggcgctaagacggctcctggaaagaagagaccggtagagccatcaccccagcgttctccagactcctctacgggcatcggcaagaaaggccaacagcccgccagaaaaagactcaattttggtcagactggcgactcagagtcagttccagaccctcaacctctcggagaaccaccagcagcccccacaagtttgggatctaatacaatggcttcaggcggtggcgcaccaatggcagacaataacgagggtgccgatggagtgggtaattcctcaggaaattggcattgcgattcccaatggctgggcgacagagtcatcaccaccagcacccgcacctgggccttgcccacctacaataaccacctctacaagcaaatctccagtgcttcaacgggggccagcaacgacaaccactacttcggctacagcaccccctgggggtattttgactttaaccgcttccactgccacttctcgccaagagactggcaaagactcatcaacaacaattggggattccggcccaagagactcaacttcaaactcttcaacatccaagtcaaggaggtcacgacgaatgatggcgtcacgaccatcgccaataacctcaccagcaccatccaggtgtttacggactcggagtaccagctgccgtacgttctcggctctgcccaccagggctgcctgcctccgttcccggcggacgtgttcatgattccccagtatggatacctcaccctgaacaacggaagtcaagcggtgggacgctcatccttttactgcctggagtacttcccttcgcagatgctaaggactggaaataacttccaattcagctataccttcgaggatgtaccttttcacagcagctacgctcacagccagagtttggatcgcttgatgaatcctcttattgatcagtatctgtactacctgaacagaacgcaaggaacaacctctggaacaaccaaccaatcacggctgctttttagccaggctgggcctcagtctatgtctttgcaggccagaaattggctacctgggccctgctaccggcaacagagactttcaaagactgctaacgacaacaacaacagtaactttccttggacagcagccagcaaatatcatctcaatggccgcgactcgctggtgaatccaggaccagctatggccagtcacaaggacgatgaagaaaaatttttccctatgcacggcaatctaatatttggcaaagaagggacaacggcaagtaacgcagaattagataatgtaatgattacggatgaagaagagattcgtaccaccaatcctgtggcaacagagcagtatggaactgtggcaaataacttgcagagctcaaatacagctcccacgactagaactgtcaatgatcagggggccttacctggcatggtgtggcaagatcgtgacgtgtaccttcaggggcccatctgggcaaagattccacacacggacggacattttcacccctctcccctcatgggtggattcggacttaaacaccctcctccgcagattctcatcaagaacaccccggtacctgcgaatccttcgaccaccttcagtgcggcaaagtttgcttccttcatcacacagtactccacgggacaggtcagcgtggagatcgagtgggagctgcagaaggaaaacagcaagcgctggaacccggagatccagtacacttccaactattacaagtctaataatgttgaatttgctgttaatactgaaggtgtatatagtgaaccccgccccattggcaccagatacctgactcgtaatctgtaa

SEQ ID NO: 384 - protein, 738 aa, Artificial Sequence
  source: /note="Description of Artificial Sequence: Synthetic polypeptide"
MAADGYLPDWLEDTLSEGIRQWWALKPGAPKPKANQQKQDDGRGLVLPGYKYLGPFNGLDKGEPVNAADAAALEHDKAYDQQLKAGDNPYLRYNHADAEFQERLQEDTSFGGNLGRAVFQAKKRVLEPLGLVEEGAKTAPGKKRPVEPSPQRSPDSSTGIGKKGQQPARKRLNFGQTGDSESVPDPQPLGEPPAAPTSLGSNTMASGGGAPMADNNEGADGVGNSSGNWHCDSQWLGDRVITTSTRTWALPTYNNHLYKQISSASTGASNDNHYFGYSTPWGYFDFNRFHCHFSPRDWQRLINNNWGFRPKRLNFKLFNIQVKEVTTNDGVTTIANNLTSTIQVFTDSEYQLPYVLGSAHQGCLPPFPADVFMIPQYGYLTLNNGSQAVGRSSFYCLEYFPSQMLRTGNNFQFSYTFEDVPFHSSYAHSQSLDRLMNPLIDQYLYYLNRTQGTTSGTTNQSRLLFSQAGPQSMSLQARNWLPGPCYRQQRLSKTANDNNNSNFPWTAASKYHLNGRDSLVNPGPAMASHKDDEEKFFPMHGNLIFGKEGTTASNAELDNVMITDEEEIRTTNPVATEQYGTVANNLQSSNTAPTTRTVNDQGALPGMVWQDRDVYLQGPIWAKIPHTDGHFHPSPLMGGFGLKHPPPQILIKNTPVPANPSTTFSAAKFASFITQYSTGQVSVEIEWELQKENSKRWNPEIQYTSNYYKSNNVEFAVNTEGVYSEPRPIGTRYLTRNL

SEQ ID NO: 385 - DNA, 2208 bp, Artificial Sequence; identical to SEQ ID NO: 21
  source: /note="Description of Artificial Sequence: Synthetic polynucleotide"

SEQ ID NO: 386 - protein, 735 aa, Artificial Sequence [sequence omitted]

SEQ ID NO: 387 - DNA, 2208 bp, Artificial Sequence
  source: /note="Description of Artificial Sequence: Synthetic polynucleotide"
atggctgccgatggttatcttccagattggctcgaggacaacctctctgagggcattcgcgagtggtgggcgctgaaacctggagccccgaagcccaaagccaaccagcaaaagcaggacgacggccggggtctggtgcttcctggctacaagtacctcggacccttcaacggactcgacaagggggagcccgtcaacgcggcggacgccgcggccctcgagcacgacaaggcctacgaccagcagctgcaggcgggtgacaatccgtacctgcggtataaccacgccgacgccgagtttcaggagcgtctgcaagaagatacgtcttttgggggcaacctcgggcgagcagtcttccaggccaaaaagaggcttcttgaacctcttggtctggttgaggaagcagctaaaacggctcctggaaagaagaggcctgtagagcagtctcctcaggaaccggactcctccgcgggtattggcaaatcgggtgcacagcccgccaaaaagagactcaatttcggtcagactggcgactcagagtcagtcccagaccctcaacctctcggagaaccaccagcagcccccacaagtttgggatctaatacaatggcttcaggcggtggcgcaccaatggcagacaataacgaaggcgccgacggagtgggtaatgcctcaggaaattggcattgcgattccacatggctgggcgacagagtcatcaccaccagcacccgcacctgggccttgcccacctacagcaaccatctctacaagcaaatctccagccaatcaggagcttcaaacgacaacgactactttggctacagcaccccttgggggtattttgatttcaacagattccactgccacttttcaccacgtgactggcaaagactcatcaacaacaactggggattccgacccaagagactcaacttcaagctctttaacattcaagtcaaagaggtcacgcagaatgacggtacgacgacgattgccaataaccttaccagcacggttcaggtgtttactgactcggagtaccagctcccgtacgtcctcggctcggcgcatcaaggatgcctcccgccgttcccagcagacgtcttcatggtgccacagtatggatacctcaccctgaacaacgggagtcaggcagtaggacgctcttcattttactgcctggagtactttccttctcagatgctgcgtaccggaaacaactttaccttcagctacacttttgaggacgttcctttccacagcagctacgctcacagccagagtctggaccgtctcatgaatcctctcatcgaccagtacctgtattacttgagcagaacaaacactccaagtggaaccaccacgcagtcaaggcttcagttttctcaggccggagcgagtgacattcgggaccagtctaggaactggcttcctggaccctgttaccgccagcagcgagtatcaaagacatctgaggataacaacaacagtgaatactcgtggactggagctaccaagtaccacctcaatggcagagactctctggtgaatccgggcccggccatggcaagccacaaggacgatgaagaaaagttttttcctcagagcggggttctcatctttgggaagcaaggctcagagaaaacaaatgtggacattgaaaaggtcatgattacagacgaagaggaaatcaggacaaccaatcccgtggctacggagcagtatggttctgtatctaccaacctccagagaggcaacagacaagcagctaccgcagatgtcaacacacaaggcgttcttccaggcatggtctggcaggacagagatgtgtaccttcaggggcccatctgggcaaagattccacacacggacggacattttcacccctctcccctcatgggtggattcggacttaaacaccctcctccacagattctcatcaagaacaccccggtacctgcgaatccttcgaccaccttcagtgcggcaaagtttgcttccttcatcacacagtactccacgggacaggtcagcgtggagatcgagtgggagctgcagaaggaaaacagcaaacgctggaatcccgaaattcagtacacttccaactacaacaagtctgttaatgtggactttactgtggacactaatggcgtgtattcagagcctcgccccattggcaccagatacctgactcgtaatctgtaa

SEQ ID NO: 388 - protein, 735 aa, Artificial Sequence
  source: /note="Description of Artificial Sequence: Synthetic polypeptide"
MAADGYLPDWLEDNLSEGIREWWALKPGAPKPKANQQKQDDGRGLVLPGYKYLGPFNGLDKGEPVNAADAAALEHDKAYDQQLQAGDNPYLRYNHADAEFQERLQEDTSFGGNLGRAVFQAKKRLLEPLGLVEEAAKTAPGKKRPVEQSPQEPDSSAGIGKSGAQPAKKRLNFGQTGDSESVPDPQPLGEPPAAPTSLGSNTMASGGGAPMADNNEGADGVGNASGNWHCDSTWLGDRVITTSTRTWALPTYSNHLYKQISSQSGASNDNDYFGYSTPWGYFDFNRFHCHFSPRDWQRLINNNWGFRPKRLNFKLFNIQVKEVTQNDGTTTIANNLTSTVQVFTDSEYQLPYVLGSAHQGCLPPFPADVFMVPQYGYLTLNNGSQAVGRSSFYCLEYFPSQMLRTGNNFTFSYTFEDVPFHSSYAHSQSLDRLMNPLIDQYLYYLSRTNTPSGTTTQSRLQFSQAGASDIRDQSRNWLPGPCYRQQRVSKTSEDNNNSEYSWTGATKYHLNGRDSLVNPGPAMASHKDDEEKFFPQSGVLIFGKQGSEKTNVDIEKVMITDEEEIRTTNPVATEQYGSVSTNLQRGNRQAATADVNTQGVLPGMVWQDRDVYLQGPIWAKIPHTDGHFHPSPLMGGFGLKHPPPQILIKNTPVPANPSTTFSAAKFASFITQYSTGQVSVEIEWELQKENSKRWNPEIQYTSNYNKSVNVDFTVDTNGVYSEPRPIGTRYLTRNL

SEQ ID NO: 389 - DNA, 2208 bp, Artificial Sequence
  source: /note="Description of Artificial Sequence: Synthetic polynucleotide"
atggctgccgatggttatcttccagattggctcgaggacaacctctctgagggcattcgcgagtggtgggcgctgaaacctggagccccgaagcccaaagccaaccagcaaaagcaggacgacggccggggtctggtgcttcctggctacaagtacctcggacccttcaacggactcgacaagggggagcccgtcaacgcggcggacgcagcggccctcgagcacgacaaggcctacgaccagcagctgcaggcgggtgacaatccgtacctgcggtataaccacgccgacgccgagttccaggagcgtctgcaagaagatacgtcttttgggggcaacctcgggcgagcagtcttccaggccaagaagagggttctcgaaccttttggtctggttgaggaaggtgctaagacggctcctggaaagaaacgtccggtagagcagtcgccacaagagccagactcctcctcgggcattggcaagacaggccagcagcccgctaaaaagagactcaattttggtcagactggcgactcagagtcagtcccagaccctcaacctctcggagaaccaccagcagcccccacaagtttgggatctaatacaatggcttcaggcggtggcgcaccaatggcagacaataacgagggcgccgacggagtgggtaattcctcgggaaattggcattgcgattccacatggatgggcgacagagtcatcaccaccagcacccgaacctgggccctgcccacctacaacaaccacctctacaaacaaatttccagccaatcaggagcttcaaacgacaaccactactttggctacagcaccccttgggggtattttgactttaacagattccactgccacttttcaccacgtgactggcagcgactcattaacaacaactggggattccggcccaagaaactcaacttcaagctctttaacatccaggtcaaggaggtcacgcagaatgaaggcaccaagaccatcgccaataacctcaccagcaccatccaggtgtttacggactcggagtaccagctgccgtacgttctcggctctgcccaccagggctgcctgcctccgttcccggcggacgtgttcatgattccccagtacggctacctaacactcaacaacggtagtcaggccgtgggacgctcctccttctactgcctggaatactttccttcgcagatgctgagaaccggcaacaacttccagtttacttacaccttcgaggacgtgcctttccacagcagctacgcccacagccagagcttggaccggctgatgaatcctctgattgaccagtacctgtattacttgtctcggactcaaacaacaggaggcacgacaaatacgcagactctgggcttcagccaaggtgggcctaatacaatggccaatcaggcaaagaactggctgcctggaccctgttaccgccagcagcgagtatcaaagacatctgcggataacaacaacagtgaatactcgtggactggagctaccaagtaccacctcaatggcagagactctctggtgaatccgggcccggccatggcaagccacaaggacgatgaagaaaagttttttcctcagagcggggttctcatctttgggaagcaaggctcagagaaaacaaatgtggacattgaaaaggttatgattacagacgaagaggaaatcaggacaaccaatcccgtggctacggagcagtatggttctgtatctaccaacctccagagaggcaacagacaagcagctaccgcagatgtcaacacacagggcgttcttccaggcatggtctggcaggacagagatgtgtaccttcagggtcccatttgggccaaaattcctcacacagatggacactttcacccgtcccctcttatgggcggctttggactcaagaacccgcctcctcagatcctcatcaaaaacacgcctgttcctgcgaatcctccggcagagttttcagctacaaagtttgcttcattcatcacccaatactccacaggacaagtgagtgtggaaattgaatgggagctgcagaaagaaaacagcaagcgctggaatcccgaagtgcagtacacatccaattatgcaaaatctgccaacgttgattttactgtggacactaatggcgtgtattcagagcctcgccccattggcaccagatacctcacccgtaatctgtaa

SEQ ID NO: 390 - protein, 735 aa, Artificial Sequence
  source: /note="Description of Artificial Sequence: Synthetic polypeptide"
MAADGYLPDWLEDNLSEGIREWWALKPGAPKPKANQQKQDDGRGLVLPGYKYLGPFNGLDKGEPVNAADAAALEHDKAYDQQLQAGDNPYLRYNHADAEFQERLQEDTSFGGNLGRAVFQAKKRVLEPFGLVEEGAKTAPGKKRPVEQSPQEPDSSSGIGKTGQQPAKKRLNFGQTGDSESVPDPQPLGEPPAAPTSLGSNTMASGGGAPMADNNEGADGVGNSSGNWHCDSTWMGDRVITTSTRTWALPTYNNHLYKQISSQSGASNDNHYFGYSTPWGYFDFNRFHCHFSPRDWQRLINNNWGFRPKKLNFKLFNIQVKEVTQNEGTKTIANNLTSTIQVFTDSEYQLPYVLGSAHQGCLPPFPADVFMIPQYGYLTLNNGSQAVGRSSFYCLEYFPSQMLRTGNNFQFTYTFEDVPFHSSYAHSQSLDRLMNPLIDQYLYYLSRTQTTGGTTNTQTLGFSQGGPNTMANQAKNWLPGPCYRQQRVSKTSADNNNSEYSWTGATKYHLNGRDSLVNPGPAMASHKDDEEKFFPQSGVLIFGKQGSEKTNVDIEKVMITDEEEIRTTNPVATEQYGSVSTNLQRGNRQAATADVNTQGVLPGMVWQDRDVYLQGPIWAKIPHTDGHFHPSPLMGGFGLKNPPPQILIKNTPVPANPPAEFSATKFASFITQYSTGQVSVEIEWELQKENSKRWNPEVQYTSNYAKSANVDFTVDTNGVYSEPRPIGTRYLTRNL

SEQ ID NO: 391 - DNA, 2214 bp, Artificial Sequence; identical to SEQ ID NO: 381
  source: /note="Description of Artificial Sequence: Synthetic polynucleotide"

SEQ ID NO: 392 - protein, 737 aa, Artificial Sequence; identical to SEQ ID NO: 382
  source: /note="Description of Artificial Sequence: Synthetic polypeptide"

SEQ ID NO: 393 - DNA, 2196 bp, Artificial Sequence
  source: /note="Description of Artificial Sequence: Synthetic polynucleotide"
atggctgctgacggttatcttccagattggctcgaggacaacctctctgagggcattcgcgagtggtgggcgctgaaacctggagccccgcaacccaaagccaaccagcaaaagcaggacgacggccggggtctggtgcttcctggctacaagtacctcggacccttcaacggactcgacaagggggagcccgtcaacgaggcggacgccgcggccctcgagcacgacaaggcctacgaccagcagctcaaagcgggtgacaatccgtacctgcggtataatcacgccgacgccgagtttcaagagcgtctgcaagaagatacgtcctttgggggcaacctcgggcgagcagtcttccaggccaaaaagagggtactcgagcctctgggtctggttgaggaaggcgctaagacggctcctggaaagaagcggccagtagaaccggactccagctcgggcatcggcaagtcaggccagcagcccgcgaaaaagagactgaattttgggcagactggcgactcagagtcagtgcctgacccccaacctctctcagaaccacccgcaggtccctctggtctgggatctggtacaatggctgctggcggtggcgctccaatggcagacaataacgaaggcgccgacggagtgggtaatgtctcaggaaattggcattgcgattccacatggctgggcgaccgagtcatcaccaccagcactcggacctgggccctccccacctacaacaaccacctctacaagcaaatctccaacgggacctcgggaggcagcagcaacgacaacacctactttggctacagcaccccctgggggtattttgactttaacagattccactgccacttttcaccacgtgactggcagcgactcatcaacaacaactgggggttccggcccaagaagctcaacttcaagctcttcaacatccaggtcaaggaggtcacccagaatgaaggcaccaagaccatcgccaataacctcaccagcacggtgcaggtctttacggactcggagtaccagctcccgtacgtgctcggctctgcccaccagggctgcctgcctccgttcccggcggacgtgttcatgattccgcagtacgggtacctgacgctgaacaacgggagccaggccgtggggcgatcctccttctactgcctggagtactttccctcgcagatgctgagaacgggcaacaactttaccttcagctacaccttcgaggacgtgcccttccacagcagctacgcgcacagccagagcctggaccggctgatgaacccgctgattgaccagtacctgtactacctgtctcggactcagaccaacgggaccaatgccacgcagactctgttgtttgctcaggccgggcctcagaacatgtcggctcaggccaagaactggctgcctggtccttgctatcggcagcagcgcgtctctacgacagtgtcgcaaaacaacaacagcaactttacctggaccggggcgaccaagtaccacctgaacggccgagactccctggtgagccccggtgtcgccatggcaacgcacaaggacgacgaggagcgcttcttcccgagcagcggggtcctgatgtttggcaagcagggcgctggaaaggacaatgtcgagtacaccaacgtgatgctcaccagcgaggaggagatcaagaccaccaaccctgtggccacggagcagtacggcgtggtggctgacaatctgcagcagaccaactcagctcccattgtgggggcagtcaacagccagggggccttacccggtatggtctggcagaaccgggacgtgtacctgcagggtcccatctgggccaagatcccgcatacggacggcaactttcacccgtctcctctcatgggcggctttggactgaaacacccgcctccccagatcctgatcaaaaacacgccggtacctgcggatcccccggtgaactttacggacgctaagctggcgagtttcatcacgcagtacagcaccgggcaggtcagcgtggagattgagtgggagctgcagaaggagaacagcaagcgctggaatcccgagattcagtacacttccaattattataaatcagctaatgtggactttgccgtcaatgcagatggtgtatatagtgaaccccgccccattggcactcgttacctcacccgtaatctgtaa

SEQ ID NO: 394 - protein, 731 aa, Artificial Sequence
  source: /note="Description of Artificial Sequence: Synthetic polypeptide"
MAADGYLPDWLEDNLSEGIREWWALKPGAPQPKANQQKQDDGRGLVLPGYKYLGPFNGLDKGEPVNEADAAALEHDKAYDQQLKAGDNPYLRYNHADAEFQERLQEDTSFGGNLGRAVFQAKKRVLEPLGLVEEGAKTAPGKKRPVEPDSSSGIGKSGQQPAKKRLNFGQTGDSESVPDPQPLSEPPAGPSGLGSGTMAAGGGAPMADNNEGADGVGNVSGNWHCDSTWLGDRVITTSTRTWALPTYNNHLYKQISNGTSGGSSNDNTYFGYSTPWGYFDFNRFHCHFSPRDWQRLINNNWGFRPKKLNFKLFNIQVKEVTQNEGTKTIANNLTSTVQVFTDSEYQLPYVLGSAHQGCLPPFPADVFMIPQYGYLTLNNGSQAVGRSSFYCLEYFPSQMLRTGNNFTFSYTFEDVPFHSSYAHSQSLDRLMNPLIDQYLYYLSRTQTNGTNATQTLLFAQAGPQNMSAQAKNWLPGPCYRQQRVSTTVSQNNNSNFTWTGATKYHLNGRDSLVSPGVAMATHKDDEERFFPSSGVLMFGKQGAGKDNVEYTNVMLTSEEEIKTTNPVATEQYGVVADNLQQTNSAPIVGAVNSQGALPGMVWQNRDVYLQGPIWAKIPHTDGNFHPSPLMGGFGLKHPPPQILIKNTPVPADPPVNFTDAKLASFITQYSTGQVSVEIEWELQKENSKRWNPEIQYTSNYYKSANVDFAVNADGVYSEPRPIGTRYLTRNL

SEQ ID NO: 395 - DNA, 2196 bp, Artificial Sequence
  source: /note="Description of Artificial Sequence: Synthetic polynucleotide"
atggctgctgacggttatcttccagattggctcgaggacaacctctctgagggcattcgcgagtggtgggcgctgaaacctggagccccgcaacccaaagccaaccagcaaaagcaggacgacggccggggtctggtgcttcctggctacaagtacctcggacccttcaacggactcgacaagggggagcccgtcaacgaggcggacgccgcggccctcgagcacgacaaggcctacgaccagcagctcaaagcgggtgacaatccgtacctgcggtataatcacgccgacgccgagtttcaagagcgtctgcaagaagatacgtcctttgggggcaacctcgggcgagcagtcttccaggccaaaaagagggtactcgagcctctgggtctggttgaggaaggcgctaagacggctcctggaaagaagcggccagtagaaccggactccagctcgggcatcggcaagtcaggccggcagcccgcgaaaaagagactgaattttgggcagactggcgactcagagtcagtgcctgacccccaacctctctcagaaccacccgcaggtccctctggtctgggatctggtacaatggctgcaggcggtggcgctccaatggcagacaataacgaaggcgccgacggagtgggtaatgcctcaggaaattggcattgcgattccacatggctgggcgaccgagtcatcaccaccagcactcggacctgggccctccccacctacaacaaccacctctacaagcaaatctccaacgggacctcgggaggcagcagcaacgacaacacctactttggctacagcaccccctgggggtattttgactttaacagattccactgccacttttcaccacgtgactggcagcgactcatcaacaacaactggggattccggcccaagaggctcaacttcaagctcttcaacatccaggtcaaggaggtcacccagaatgaaggcaccaagaccatcgccaataacctcaccagcacggtgcaggtctttacggactcgaagtaccagctcccgtacgtgctcggctctgcccaccagggctgcctgcctccgttcccggcggacgtgttcatgattccgcagtacgggtacctgacgctgaacaacgggagccaggccgtggggcgatcctccttctactgcctggagtactttccctcgcagatgctgagaacgggcaacaactttaccttcagctacaccttcgaggacgtgcccttccacagcagctacgcgcacagccagagcctggaccggctgatgaacccgctgattgaccagtacctgtactacctgtctcggactcagaccaacgggaccaatgccacgcagactctgttgtttgctcaggccgggcctcagaacatgtcggctcaggccaagaactggctgcctggtccttgctatcggcagcagcgcgtctctacgacagtgtcgcaaaacaacaacagcaactttacctggaccggggcgaccaagtaccacctgaacggccgagactccctggtgaaccccggtgtcgccatggcaacgcacaaggacgacgaggagcgcttcttcccgagcagcggggtcctgatgtttggcaagcagggcgctggaaaggacaatgtcgagtacaccaacgtgatgctcaccagcgaggaggagatcaagaccaccaaccctgtggccacggagcagtacggtgtggtggctgacaatctgcagcagaccaactcggctcccattgtgggggcagtcaacagccagggggccttacccggtatggtctggcagaaccgggacgtgtacctgcagggtcccatctgggccaagatcccgcatacggacggcaactttcacccgtctcctctcatgggcggctttggactgaaacacccgcctccccagatcctgatcaaaaacacgccggtacctgcggatcccccggtgaactttacggacgctaagctggcgagtttcatcacgcagtacagcaccgggcaggtcagcgtggagattgagtgggagctgcagaaggagaacagcaagcgctggaatcccgagattcagtacacttccaattattataaatcagctaatgtggactttgccgtcaatgcagatggtgtatatagtgaaccccgccccattggcactcgttacctcacccgtaatctgtaa

SEQ ID NO: 396 - protein, 731 aa, Artificial Sequence
  source: /note="Description of Artificial Sequence: Synthetic polypeptide"
MAADGYLPDWLEDNLSEGIREWWALKPGAPQPKANQQKQDDGRGLVLPGYKYLGPFNGLDKGEPVNEADAAALEHDKAYDQQLKAGDNPYLRYNHADAEFQERLQEDTSFGGNLGRAVFQAKKRVLEPLGLVEEGAKTAPGKKRPVEPDSSSGIGKSGRQPAKKRLNFGQTGDSESVPDPQPLSEPPAGPSGLGSGTMAAGGGAPMADNNEGADGVGNASGNWHCDSTWLGDRVITTSTRTWALPTYNNHLYKQISNGTSGGSSNDNTYFGYSTPWGYFDFNRFHCHFSPRDWQRLINNNWGFRPKRLNFKLFNIQVKEVTQNEGTKTIANNLTSTVQVFTDSKYQLPYVLGSAHQGCLPPFPADVFMIPQYGYLTLNNGSQAVGRSSFYCLEYFPSQMLRTGNNFTFSYTFEDVPFHSSYAHSQSLDRLMNPLIDQYLYYLSRTQTNGTNATQTLLFAQAGPQNMSAQAKNWLPGPCYRQQRVSTTVSQNNNSNFTWTGATKYHLNGRDSLVNPGVAMATHKDDEERFFPSSGVLMFGKQGAGKDNVEYTNVMLTSEEEIKTTNPVATEQYGVVADNLQQTNSAPIVGAVNSQGALPGMVWQNRDVYLQGPIWAKIPHTDGNFHPSPLMGGFGLKHPPPQILIKNTPVPADPPVNFTDAKLASFITQYSTGQVSVEIEWELQKENSKRWNPEIQYTSNYYKSANVDFAVNADGVYSEPRPIGTRYLTRNL

SEQ ID NO: 397 - DNA, 2196 bp, Artificial Sequence
  source: /note="Description of Artificial Sequence: Synthetic polynucleotide"
atggctgctgacggttatcttccagattggctcgaggacaacctctctgagggcattcgcgagtggtgggcgctgaaacctggagccccgcaacccaaagccaaccagcaaaagcaggacgacggccggggtctggtgcttcctggctacaagtacctcggacccttcaacggactcgacaagggggagcccgtcaacgaggcggacgccgcggccctcgagcacgacaaggcctacgaccagcagctcaaagcgggtgacaatccgtacctgcggtataatcacgccgacgccgagtttcaagagcgtctgcaagaagatacgtcctttgggggcaacctcgggcgagcagtcttccaggccaaaaagagggtactcgagcctctgggtctggttgaggaaggcgctaagacggctcctggaaagaagcggccagtagaaccggactccagctcgggcatcggcaagtcaggccagcagcccgcgaaaaagagactgaattttgggccgactggcgactcagagtcagtgcctgacccccaacctctctcagaaccacctgcaggtccctctggtctgggatctggtacaatggctgcaggcggtggcgctccaatggcagacaataacgaaggcgccgacggagtgggtaatgtctcaggaaattggcattgcgattccacatggctgggcgaccgagtcatcaccaccagcactcggacctgggccctccccacctacaacaaccacctctacaagcaaatctccaacgggacctcgggaggcagcagcaacgacaacacctactttggctacagcaccccctgggggtattttgactttaacagattccactgccacttttcaccacgcgactggcagcgactcatcaacaacaactggggattccggcccaagaagctcaacttcaagctcttcaacatccaggtcaaggaggtcacccagaatgaaggcaccaagaccaccgccaataacctcaccagcacggtgcaggtctttacggactcggagtaccagctcccgtacgtgctcggctctgcccaccagggctgcctgcctccgttcccggcggacgtgttcatgattccgcagtacgggtacctgacgctgaacaacgggagccaggccgtggggcgatcctccttctactgcctggagtactttccctcgcagatgctgagaacgggcaacaactttaccttcagctacaccttcgaggacgtgcccttccacagcagctacgcgcacagccagagcctggaccggctgatgaacccgctgattgaccagtacctgtactacctgtctcggactcagaccaacgggaccaatgccacgcagactctgttgtttgctcaggccgggcctcagaacatgtcggctcaggccaagaactggctgcctggtccttgctatcggcagcagcgcgtctctacggcagtgtcgcaaaacaacaacagcaactttacctggaccggggcgaccaagtaccacctgaacggccgagactccctggtgaaccccggtgtcgccatggcaacgcacaaggacgacgaggagcgcttcttcccgagcagcggggtcctgatgtttggcaagcagggcgctggaaaggacaatgtcgagtacaccaacgtgatgctcaccagcgaggaggagatcaagaccaccaaccctgtggccacggagcagtacggtgtggtggctgacaatctgcagcagaccaactcggctcccattgtgggggcagtcaacagccagggggccttacccggtatggtctggcagaaccgggacgtgtacctgcagggtcccatctgggccaagatcccgcatacggacggcaactttcacccgtctcctctcatgggcggctttggactgaaacacccgcctccccagatcctgatcaaaaacacgccggtacctgcggatcccccggtgaactttacggacgctaagctggcgagtttcatcacgcagtacagcaccgggcaggtcagcgtggagattgagtgggagctgcagaaggagaacagcaagcgctggaatcccgagattcagtacacttccaattattataaatcagctaatgtggactttgccgtcaatgcagatggtgtatatagcgaaccccgccccattggcactcgttacctcacccgtaatctgtaa

SEQ ID NO: 398 - protein, 731 aa, Artificial Sequence
  source: /note="Description of Artificial Sequence: Synthetic polypeptide"
MAADGYLPDWLEDNLSEGIREWWALKPGAPQPKANQQKQDDGRGLVLPGYKYLGPFNGLDKGEPVNEADAAALEHDKAYDQQLKAGDNPYLRYNHADAEFQERLQEDTSFGGNLGRAVFQAKKRVLEPLGLVEEGAKTAPGKKRPVEPDSSSGIGKSGQQPAKKRLNFGPTGDSESVPDPQPLSEPPAGPSGLGSGTMAAGGGAPMADNNEGADGVGNVSGNWHCDSTWLGDRVITTSTRTWALPTYNNHLYKQISNGTSGGSSNDNTYFGYSTPWGYFDFNRFHCHFSPRDWQRLINNNWGFRPKKLNFKLFNIQVKEVTQNEGTKTTANNLTSTVQVFTDSEYQLPYVLGSAHQGCLPPFPADVFMIPQYGYLTLNNGSQAVGRSSFYCLEYFPSQMLRTGNNFTFSYTFEDVPFHSSYAHSQSLDRLMNPLIDQYLYYLSRTQTNGTNATQTLLFAQAGPQNMSAQAKNWLPGPCYRQQRVSTAVSQNNNSNFTWTGATKYHLNGRDSLVNPGVAMATHKDDEERFFPSSGVLMFGKQGAGKDNVEYTNVMLTSEEEIKTTNPVATEQYGVVADNLQQTNSAPIVGAVNSQGALPGMVWQNRDVYLQGPIWAKIPHTDGNFHPSPLMGGFGLKHPPPQILIKNTPVPADPPVNFTDAKLASFITQYSTGQVSVEIEWELQKENSKRWNPEIQYTSNYYKSANVDFAVNADGVYSEPRPIGTRYLTRNL

SEQ ID NO: 399 - DNA, 4404 bp, Artificial Sequence
  source: /note="Description of Artificial Sequence: Synthetic polynucleotide"
atggctgccgatggttatcttccagattggctcgagggcaacctctctgagggcattcgcgagtggtgggacttgaaacctggagccccgaaacccaaagccaaccagcaaaagcaggacgacggccggggtctggtgcttcctggctacaggtacctcggacccttcaacggactcgacaagggagagccggtcaacgaggcagacgccgcggccctcgagcacgacaaggcctacgacaagcagctcgagcagggggacaacccgtacctcaagtacaaccacgccgacgccgagtttcaggagcgtcttcaagaagatacgtcttttgggggcaacctcgggcgagcagtcttccaggccaagaagcgggttctcgaacctctcggtctggttgaggaaggcgctaagacggctcctggaaagaagagacccatagaatcccccgactcctccacgggcatcggcaagaacggccagccgcccgctaaaaagaagctcaactttgggcagactggcgactcagagtcagtgcccgacccccaacctctcggagaacctcccgccgcgccctcaggtctgggatctggtacaatggctgcaggcggtggcgcaccaatggcagacaataacgaaggcgccgacggagtgggtaatgcctccggaaattggcattgcgattccacatggctgggcgacagagtcatcaccaccagcacccgcacctgggccctgcccacctacaacaaccacctctacaagcagatatcaagtcagagcggggctaccaacgacaaccacttcttcggctacagcaccccctggggctattttgacttcaacagattccactgccacttctcaccacgtgactggcagcgactcatcaacaacaactggggattccggcccagaaagctgcggttcaagttgttcaacatccaggtcaaggaggtcacgacgaacgacggcgttacgaccatcgctaataaccttaccagcacgattcaggtcttctcggactcggagtaccaactgccgtacgtcctcggctctgcgcaccagggctgcctccctccgttccctgcggacgtgttcatgattcctcagtacggatatctgactctaaacaacggcagtcagtctgtgggacgttcctccttctactgcctggagtactttccttctcagatgctgagaacgggcgataactttgaattcagctacacctttgaggaagtgcctttccacagcagctatgcgcacagccagagcctggaccggctgatgaatcccctcatcgaccagtacctgtactacctggcccggacccagagcactacggggtccacaagggagctgcagttccatcaggctgggcccaacaccatggccgagcaatcaaagaactggctgcccggaccctgttatcggcagcagagactgtcaaaaaacatagacagcaacaacaacagtaactttgcctggaccggggccactaaataccatctgaatggtagaaattcattaaccaacccgggcgtagccatggccaccaacaaggacgacgaggaccagttctttcccatcaacggagtgctggtttttggcaaaacgggggctgccaacaagacaacgctggaaaacgtgctaatgaccagcgaggaggagatcaaaaccaccaatcccgtggctacagaagaatacggtgtggtctccagcaacctgcaatcgtctacggccggaccccagacacagactgtcaacagccagggggctctgcccggcatggtctggcagaaccgggacgtgtacctgcagggtcccatctgggccaaaattcctcacacggacggcaactttcacccgtctcccctgatgggcggatttggactcaaacacccgcctcctcaaattctcatcaaaaacaccccggtacctgctaatcctccagaggtgtttactcctgccaagtttgcctcatttatcacgcagtacagcaccggccaggtcagcgtggagatcgagtgggaactgcagaaagaaaacagcaaacgctggaatccagagattcagtacacctcaaattatgccaagtctaataatgtggaatttgctgtcaacaacgaaggggtttatactgagcctcgccccattggcacccgttacctcacccgtaacctgtaaatggctgccgatggttatcttccagattggctcgaggacaacctctctgagggcattcgcgagtggtgggacttgaaacctggagccccgaaacccaaagccaaccagcaaaagcaggacgacggccggggtctggtgcttcctggctacaagtacctcggacccttcaacggactcgacaagggggagcccgtcaacgcggcggacgcagcggccctcgagcacgacaaggcctacgaccagcagctcaaagcgggtgacaatccgtacctgcggtataaccacgccgacgccgagtttcaggagcgtctgcaagaagatacgtcttttgggggcaacctcgggcgagcagtcttccaggccaagaagcgggttctcgaacctctcggtctggttgaggaaggcgctaagacggctcctggaaagaagagaccggtagagccatcaccccagcgttctccagactcctctacgggcatcggcaagaaaggccagcagcccgcgaaaaagagactcaactttgggcagactggcgactcagagtcagtgcccgaccctcaaccaatcggagaaccccccgcaggcccctctggtctgggatctggtacaatggctgcaggcggtggcgctccaatggcagacaataacgaaggcgccgacggagtgggtagttcctcaggaaattggcattgcgattccacatggctgggcgacagagtcatcaccaccagcacccgaacctgggccctccccacctacaacaaccacctctacaagcaaatctccaacgggacttcgggaggaagcaccaacgacaacacctacttcggctacagcaccccctgggggtattttgactttaacagattccactgccacttctcaccacgtgactggcagcgactcatcaacaacaactggggattccggcccaagagactcaacttcaagctcttcaacatccaggtcaaggaggtcacgcagaatgaaggcaccaagaccatcgccaataaccttaccagcacgattcaggtctttacggactcggaataccagctcccgtacgtcctcggctctgcgcaccagggctgcctgcctccgttcccggcggacgtcttcatgattcctcagtacgggtacctgactctgaacaatggcagtcaggccgtgggccgttcctccttctactgcctggagtactttccttctcaaatgctgagaacgggcaacaactttgagttcagctaccagtttgaggacgtgccttttcacagcagctacgcgcacagccaaagcctggaccggctgatgaaccccctcatcgaccagtacctgtactacctgtctcggactcagtccacgggaggtaccgcaggaactcagcagttgctattttctcaggccgggcctaataacatgtcggctcaggccaaaaactggctacccgggccctgctaccggcagcaacgcgtctccacgacactgtcgcaaaataacaacagcaactttgcctggaccggtgccaccaagtatcatctgaatggcagagactctctggtaaatcccggtgtcgctatggcaacccacaaggacgacgaagagcgattttttccgtccagcggagtcttaatgtttgggaaacagggagctggaaaagacaacgtggactatagcagcgttatgctaaccagtgaggaagaaattaaaaccaccaacccagtggccacagaacagtacggcgtggtggccgataacctgcaacagcaaaacgccgctcctattgtaggggccgtcaacagtcaaggagccttacctggcatggtctggcagaaccgggacgtgtacctgcagggtcctatctgggccaagattcctcacacggacggaaactttcatccctcgccgctgatgggaggctttggactgaaacacccgcctcctcagatcctgattaagaatacacctgttcccgcggatcctccaactaccttcagtcaagctaagctggcgtcgttcatcacgcagtacagcaccggacaggtcagcgtggaaattgaatgggagctgcagaaagaaaacagcaaacgctggaacccagagattcaatacacttccaactactacaaatctacaaatgtggactttgctgttaacacagatggcacttattctgagcctcgccccatcggcacccgttacctcacccgtaatctgtaa

SEQ ID NO: 400 - protein, 738 aa, Artificial Sequence; identical to SEQ ID NO: 18
  source: /note="Description of Artificial Sequence: Synthetic polypeptide"

SEQ ID NO: 401 - DNA, 3129 bp, Artificial Sequence
  source: /note="Description of Artificial Sequence: Synthetic polynucleotide"
gaattcgccctttctacggctgcgtcaactggaccaatgagaactttcccttcaacgattgcgtcgacaagatggtgatctggtgggaggagggcaagatgacggccaaggtcgtggagtccgccaaggccattctcggcggcagcaaagtgcgcgtggaccaaaagtgcaagtcgtccgcccagatcgaccccacccccgtgatcgtcacctccaacaccaacatgtgcgccgtgattgacgggaacagcaccaccttcgagcaccagcagccgttgcaggaccggatgttcaagtttgaactcacccgccgtctggagcacgactttggcaaggtgacaaagcaggaagtcagagagttcttccgctgggcgcaggatcacgtgaccgaggtggcgcacgagttctacgtcagaaagggtggagccaacaagagacccgcccccgatgacgcggataaaagcgagcccaagcgggcctgcccctcagtcgcggatccatcgacgtcagacgcggaaggagctccggtggactttgccgacaggtaccaaaacaaatgttctcgtcacgcgggcatgcttcagatgctgtttccctgcaaaacatgcgagagaatgaatcagaatttcaacatttgcttcacgcacgggaccagagactgttcagaatgtttccccggcgtgtcagaatctcaaccggtcgtcagaaaaaagacgtatcggaaactctgtgcgattcatcatctgctgggggcgggcacccgagattgcttgctcggcctgcgatctggtcaacgtggacctagatgactgtgtttctgagcaataaatgacttaaaccaggtatggctgccgatggttatcttccagattggctcgaggacaacctctctgagggcattcgcgagtggtgggacttgaaacctggagccccgaaacccaaagccaaccagcaaaagcaggacgacggccggggtctggtgcttcctggctacaagtacctcggacccttcaacggactcgacaagggggagcccgtcaacgcggcggacgcagcggccctcgagcacgacaaggcctacgaccagcagctcaaagcgggtgacaatccgtacctgcggtataaccacgccgacgccgagtttcaggagcgtctgcaagaagatacgtcttttgggggcaacctcgggcgagcagtcttccaggccaagaagcgggttctcgaacctctcggtctggttgaggaaggcgctaagacggctcctggaaagaagagaccggtagagccatcaccccagcgttctccagactcctctacgggcatcggcaagaaaggccagcagcccgcgaaaaagagactcaactttgggcagactggcgactcagagtcagtgcccgaccctcaaccaatcggagaaccccccgcaggcccctctggtctgggatctggtacaatggctgcaggcggtggcgctccaatggcagacaataacgaaggcgccgacggagtgggtagttcctcaggaaattggcattgcgattccacatggctgggcgacagagtcatcaccaccagcacccgaacctgggccctccccacctacaacaaccacctctacaagcaaatctccaacgggacttcgggaggaagcaccaacgacaacacctacttcggctacagcaccccctgggggtattttgactttaacagattccactgccacttctcaccacgtgactggcagcgactcatcaacaacaactggggattccggcccaagagactcaacttcaagctcttcaacatccaggtcaaggaggtcacgcagaatgaaggcaccaagaccatcgccaataaccttaccagcacgattcaggtctttacggactcggaataccagctcccgtacgtcctcggctctgcgcaccagggctgcctgcctccgttcccggcggacgtcttcatgattcctcagtacgggtacctgactctgaacaatggcagtcaggccgtgggccgttcctccttctactgcctggagtactttccttctcaaatgctgagaacgggcaacaactttgagttcagctaccagtttgaggacgtgccttttcacagcagctacgcgcacagccaaagcctggaccggctgatgaaccccctcatcgaccagtacctgtactacctgtctcggactcagtccacgggaggtaccgcaggaactcagcagttgctattttctcaggccgggcctaataacatgtcggctcaggccaaaaactggctacccgggccctgctaccggcagcaacgcgtctccacgacactgtcgcaaaataacaacagcaactttgcctggaccggtgccaccaagtatcatctgaatggcagagactctctggtaaatcccggtgtcgctatggcaacccacaaggacgacgaagagcgattttttccgtccagcggagtcttaatgtttgggaaacagggagctggaaaagacaacgtggactatagcagcgttatgctaaccagtgaggaagaaattaaaaccaccaacccagtggccacagaacagtacggcgtggtggccgataacctgcaacagcaaaacgccgctcctattgtaggggccgtcaacagtcaaggagccttacctggcatggtctggcagaaccgggacgtgtacctgcagggtcctatctgggccaagattcctcacacggacggaaactttcatccctcgccgctgatgggaggctttggactgaaacacccgcctcctcagatcctgattaagaatacacctgttcccgcggatcctccaactaccttcagtcaagctaagctggcgtcgttcatcacgcagtacagcaccggacaggtcagcgtggaaattgaatgggagctgcagaaagaaaacagcaaacgctggaacccagagattcaatacacttccaactactacaaatctacaaatgtggactttgctgttaacacagatggcacttattctgagcctcgccccatcggcacccgttacctcacccgtaatctgtaattgcttgttaatcaataaaccggttgattcgtttcagttgaactttggtctctgcgaagggcgaattc

SEQ ID NO: 402 - protein, 738 aa, Artificial Sequence; identical to SEQ ID NO: 18
  source: /note="Description of Artificial Sequence: Synthetic polypeptide"

SEQ ID NO: 403 - protein, 733 aa, Artificial Sequence
  source: /note="Description of Artificial Sequence: Synthetic polypeptide"
MAADGYLPDWLEDNLSEGIREWWDLRPGAPKPKANQQKQDDGRGLVLPGYKYLGPFNGLDKGEPVNEADAAALEHDKAYDKQLEQGDNPYLKYNHADAEFQERLQEDTSFGGNLGRAVFQAKKRVLEPLGLVEEGAKTAPGKKRPIESPDSSTGIGKKGQQPAKKRLNFGQTGDSESVPDPQPIGEPPAGPSGLGSGTMAAGGGAPMADNNEGADGVGSSSGNWHCDSTWLGDRVITTSTRTWALPTYNNHLYKQISNGTSGGSTNDNTYFGYSTPWGYFDFNRFHCHFSPRDWQRLINNNWGFRPKRLNFKLFNIQVKEVTQNEGTKTIANNLTSTIQVFTDSEYQLPYVLGSAHQGCLPPFPADVFMIPQYGYLTLNNGSQAVGRSSFYCLEYFPSQMLRTGNNFEFSYQFEDVPFHSSYAHSQSLDRLMNPLIDQYLYYLSRTQSTGGTAGTQQLLFSQAGPNNMSAQAKNWLPGPCYRQQRVSTTVSQNNNSNFAWTGATKYHLNGRDSLVNPGVAMATHKGDEERFFPSSGVLMFGKQGAGKDNVDYSSVMLTSEEEIKTTNPVATEQYGVVADNLQQQNAAPIVGAVNSQGALPGMVWQNRDVYLQGPIWAKIPHTDGNFHPSPLMGGFGLKHPPPQILIKNTPVPADPPTTFSQAKLASFITQYSTGQVSVEIEWELQKENSKRWNPEIQYTSNYYKSTNVDFAVNTEGTYSEPRPIGTRYLTRNL

SEQ ID NO: 404 - DNA, 2501 bp, Artificial Sequence
  source: /note="Description of Artificial Sequence: Synthetic polynucleotide"
gaattcgcccttggctgcgtcaactggaccaatgagaactttcccttcaacgattgcgtcgacaagatggtgatctggtgggaggagggcaagatgacggccaaggtcgtggagtccgccaaggccattcatcatctgctggggcgggctcccgagattgcttgctcggcctgcgatctggtcaacgtggacctggatgactgtgtttctgagcaataaatgacttaaaccaggtatggctgccgatggttatcttccagattggctcgaggacaacctctctgagggcattcgcgagtggtgggacttgagacctggagccccgaaacccaaagccaaccagcaaaagcaggacgacggccggggtctggtgcttcctggctacaagtacctcggacccttcaacggactcgacaagggagagccggtcaacgaggcagacgccgcggccctcgagcacgacaaggcctacgacaagcagctcgagcagggggacaacccgtacctcaagtacaaccacgccgacgccgagtttcaggagcgtcttcaagaagatacgtcttttgggggcaacctcgggcgagcagtcttccaggccaagaagcgggttctcgaacctctcggtctggttgaggaaggcgctaagacggctcctggaaagaagagacccatagaatcccccgactcctccacgggcatcggcaagaaaggccagcagcccgctaaaaagagactcaactttgggcagactggcgactcagagtcagtgcccgaccctcaaccaatcggagaaccccccgcaggcccctctggtctgggatctggcacaatggctgcaggcggtggcgctccaatggcagacaataacgaaggcgccgacggagtgggtagttcctcaggaaattggcattgcgattccacatggctgggcgacagagtcatcaccaccagcacccgaacctgggccctccccacctacaacaaccacctctacaagcaaatctccaacgggacatcgggaggaagcaccaacgacaacacctacttcggctacagcaccccctgggggtattttgactttaacagattccactgccacttctcaccacgtgactggcagcgactcatcaacaacaactggggattccggcccaagagactcaacttcaagctcttcaacatccaggtcaaggaggtcacgcagaatgaaggcaccaagaccatcgccaataaccttaccagcacgattcaggtctttacggactcggaataccagctcccgtacgtcctcggctctgcgcaccagggctgcctgcctccgttcccggcggacgtcttcatgattcctcagtacgggtacctgactctgaacaacggcagtcaggccgtgggccgttcctccttctactgcctggagtactttccttctcaaatgctgagaacgggcaacaactttgagttcagctaccagtttgaggacgtgccttttcacagcagctatgcgcacagccaaagcctggaccggctgatgaaccccctcatcgaccagtacctgtactacctgtctcggactcagtccacgggaggtaccgcaggaactcagcagttgctattttctcaggccgggcctaataacatgtcggctcaggccaaaaactggctacccgggccctgctaccggcagcaacgcgtctccacgacagtgtcgcaaaataacaacagcaactttgcttggaccggtgccaccaagtatcatctgaatggcagagactctctggtaaatcccggtgtcgctatggcaacgcacaagggcgacgaagagcgattttttccatccagcggagtcttgatgtttgggaaacagggagctggaaaagacaacgtagactatagcagcgttatgctaaccagtgaggaagaaatcaaaaccaccaacccagtggccacagaacagtacggcgtggtggccgataacctgcaacagcaaaacgccgctcctattgtaggggccgtcaacagtcaaggagccttacctggcatggtctggcagaaccgggacgtgtacctgcagggtcctatctgggccaagattcctcacacggacggcaactttcatccttcgccgctgatgggaggctttggactgaaacacccgcctcctcagatcctgattaagaatacacctgttcccgcggatcctccaactaccttcagtcaagccaagctggcgtcgttcatcacgcagtacagcaccggacaggtcagcgtggaaattgaatgggagctgcagaaagagaacagcaagcgctggaacccagagattcagtatacttccaactactacaaatctacaaatgtggactttgctgtcaatactgagggtacttattcagagcctcgccccattggcacccgttacctcacccgtaacctgtaattgcctgttaatcaataaaccggttgattcgtttcagttgaactttggtctcaagggcgaattc

SEQ ID NO: 405 - DNA, 2187 bp, Artificial Sequence
  source: /note="Description of Artificial Sequence: Synthetic polynucleotide"
atggctgccgatggttatcttccagattggctcgaggacaacctctctgagggcattcgcgagtggtgggacttgaaacctggagccccgaaacccaaagccaaccagcaaaagcaggacgacggccggggtctggtgcttcctggctacaagtacctcggacccttcaacggactcgacaagggagagccggtcaacgaggcagacgccgcggccctcgagcacgacaaggcctacgacaagcagctcgagcagggggacaacccgtacctcaagtacaaccacgccgacgccgagtttcaggagcgtcttcaagaagatacgtcttttgggggcaacctcgggcgagcagtcttccaggccaagaagcgggttctcgaacctctcggtctggttgaggaaggcgctaagacggctcctggaaagaagagacccatagaatcccccgactcctccacgggcatcggcaagaaaggccagcagcccgctaaaaagaagctcaactttgggcagactggcgactcagagtcagtgcccgacccccaacctctcggagaacctcccgccgcgccctcaggtctgggatctggtacaatggctgcaggcggtggcgcaccaatggcagacaataacgaaggcgccgacggagtgggtaatgcctccggaaattggcattgcgattccacatggctgggcgacagagtcatcaccaccagcacccgcacctgggccctgcccacctacaacaaccacctctacaagcagatatcaagtcagagcggggctaccaacgacaaccacttcttcggctacagcaccccctggggctattttgacttcaacagattccactgccacttctcaccacgtgactggcagcgactcatcaacaacaactggggattccggcccagaaagctgcggttcaagttgttcaacatccaggtcaaggaggtcacgacgaacgacggcgttacgaccatcgctaataaccttaccagcacgattcaggtcttctcggactcggagtaccaactgccgtacgtcctcggctctgcgcaccagggctgcctccctccgttccctgcggacgtgttcatgattcctcagtacggatatctgactctaaacaacggcagtcagtctgtgggacgttcctccttctactgcctggagtactttccttctcagatgctgagaacgggcaataactttgaattcagctacacctttgaggaagtgcctttccacagcagctatgcgcacagccagagcctggaccggctgatgaatcccctcatcgaccagtacctgtactacctggcccggacccagagcactacggggtccacaagggagctgcagttccatcaggctgggcccaacaccatggccgagcaatcaaagaactggctgcccggaccctgttatcggcagcagagactgtcaaaaaacatagacagcaacaacaacagtaactttgcctggaccggggccactaaataccatctgaatggtagaaattcattaaccaacccgggcgtagccatggccaccaacaaggacgacgaggaccagttctttcccatcaacggagtgctggtttttggcgaaacgggggctgccaacaagacaacgctggaaaacgtgctaatgaccagcgaggaggagatcaaaaccaccaatcccgtggctacagaagaatacggtgtggtctccagcaacctgcaatcgtctacggccggaccccagacacagactgtcaacagccagggggctctgcccggcatggtctggcagaaccgggacgtgtacctgcagggtcccatctgggccaaaattcctcacacggacggcaactttcacccgtctcccctgatgggcggatttggactcaaacacccgcctcctcaaattctcatcaaaaacaccccggtacctgctaatcctccagaggtgtttactcctgccaagtttgcctcatttatcacgcagtacagcaccggccaggtcagcgtggagatcgagtgggaactgcagaaagaaaacagcaaacgctggaatccagagattcagtacacctcaaattatgccaagtctaataatgtggaatttgctgtcaacaacgaaggggtttatactgagcctcgccccattggcacccgttacctcacccgtaacctgtaa

SEQ ID NO: 406 - protein, 728 aa, Artificial Sequence; identical to SEQ ID NO: 74
  source: /note="Description of Artificial Sequence: Synthetic polypeptide"

SEQ ID NO: 407 - protein, 728 aa, Artificial Sequence; identical to SEQ ID NO: 166
  source: /note="Description of Artificial Sequence: Synthetic polypeptide"

SEQ ID NO: 408 - protein, 728 aa, Artificial Sequence; identical to SEQ ID NO: 166
  source: /note="Description of Artificial Sequence: Synthetic polypeptide"

SEQ ID NO: 409 - protein, 733 aa, Artificial Sequence
  source: /note="Description of Artificial Sequence: Synthetic polypeptide"
MAADGHLPDWLEDNLSEGIREWWDLKPGAPKPKANQQKQDDGRGLVLPGYKYLGPFNGLDKGEPVNAADAAALEHDKAYDQQLKAGDNPYLRYNHADAEFQERLQEDTSFGGNLGRAVFQAKKRVLEPLGLVEEGAKTAPGKKRPIESPDSSTGIGKKGQQPAKKKLNFGQTGDSESVPDPQPIGEPPAGPSGLGSGTMAAGGGAPMADNNEGADGVGSSSGNWHCDSTWLGDRVITTSTRTWALPTYNNHLYKQISNGTSGGSTNDNTYFGYSTPWGYFDFNRFHCHFSPRDWQRLINNSWGFRPKRLNFKLFNIQVKEVTQNEGTKTIANNLTSTIQVFTDSEYQLPYVLGSAHQGCLPPFPADVFMIPQYGYLTLNNGSQAVGRSSFYCLEYFPSQMLRTGNNFEFSYQFEDVPFHSSYAHSQSLDRLMNPLIDQYLYYLSRTQSTGGTAGTQQLLFSQAGPNNMSAQAKNWLPGPCYRQQRVSTTLSQNNNSNFAWTGATKYHLNGRDSLVNPGVAMATHKDDEERFFPSSGVLMFGKQGAGKDNVDYSSVMLTSEEEIKTTNPVATEQYGVVADNLQQQNAAPIVGAVNSQGALPGMVWQNRDVYLQGPIWAKIPHTDGNFHPSPLMGGFGLKHPPPQILIKNTPVPADPPTTFSQAKLASFITQYSTGQVSVEIEWELQKENSKRWNPEIQYTSNYYKSTNVDFAVNTEGTYSEPRPIGTRYLTRNL

SEQ ID NO: 410 - DNA, 3113 bp, Artificial Sequence
  source: /note="Description of Artificial Sequence: Synthetic polynucleotide"
gaattcgccctttctacggctgcgtcaactggaccaatgagaactttcccttcaacgattgcgtcgacaagatggtgatctggtgggaggagggcaagatgacggccaaggtcgtggagtccgccaaggccattctcggcggcagcaaggtgcgcgtggaccaaaagtgcaagtcgtccgcccagatcgatcccacccccgtgatcgtcacttccaacaccaacatgtgcgccgtgattgacgggaacagcaccaccttcgagcaccagcagccgttacaagaccggatgttcaaatttgaactcacccgccgtctggagcatgactttggcaaggtgacaaagcaggaagtcaaagagttcttccgctgggcgcaggatcacgtgaccgaggtggcgcatgagttctacgtcagaaagggtggagccaacaagagacccgcccccgatgacgcggataaaagcgagcccaagcgggcctgcccctcagtcgcggatccatcgacgtcagacgcggaaggagctccggtggactttgccgacaggtaccaaaacaaatgttctcgtcacgcgggcatgcttcagatgctgcttccctgcaagacatgcgagagaatgaatcagaatttcagcatttgcttcacgcacgggaccagagactgttcagaatgtttccccggcgtgtcagaatctcaaccggtcgtcagaaagaggacgtatcggaaactctgtgccattcatcatctgctggggcgggctcccgagattgcttgctcggcctgcgatctggtcaacgtggacctggatgactgtgtttctgagcaataaatgacttaaaccaggtatggctgccgatggtcatcttccagattggctcgaggacaacctctctgagggcattcgcgagtggtgggacttgaaacctggagccccgaaacccaaagccaaccagcaaaagcaggacgacggccggggtctggtgcttcctggctacaagtacctcggacccttcaacggactcgacaagggggagcccgtcaacgcggcggacgcagcggccctcgagcacgacaaggcctacgaccagcagctcaaagcgggtgacaatccgtacctgcggtataaccacgccgacgccgagtttcaggagcgtcttcaagaagatacgtcttttgggggcaacctcgggcgagcagtcttccaggccaagaagcgggttctcgaacctctcggtctggttgaggaaggcgctaagacggctcctggaaagaagagacccatagaatcccccgactcctccacgggcatcggcaagaaaggccagcagcccgctaaaaagaagctcaactttgggcagactggcgactcagagtcagtgcccgaccctcaaccaatcggagaaccccccgcaggcccctctggtctgggatctggtacaatggctgcaggcggtggcgctccaatggcagacaataacgaaggcgccgacggagtgggtagttcctcaggaaattggcattgcgattccacatagctgggcgacagagtcatcaccaccagcacccgaacctgggccctccccacctacaacaaccacctctacaagcaaatctccaacgggacatcgggaggaagcaccaacgacaacacctacttcggctacagcaccccctgggggtattttgactttaacagattccactgccacttctcaccacgtgactggcagcgactcatcaacaacagctggggattccggcccaagagactcaacttcaagctcttcaacatccaggtcaaggaggtcacgcagaatgaaggcaccaagaccatcgccaataaccttaccagcacgattcaggtctttacggactcggaataccagctcccgtacgtcctcggctctgcgcaccagggctgcctgcctccgttcccggcggacgtcttcatgattcctcagtacgggtacctgactctgaacaacggcagtcaggccgtgggccgttcctccttctactgcctggagtactttccttctcaaatgctgagaacgggcaacaactttgagttcagctaccagtttgaggacgtgccttttcacagcagctacgcgcacagccaaagcctggaccggctgatgaaccccctcatcgaccagtacctgtactacctgtctcggactcagtccacgggaggtaccgcaggaactcagcagttgctattttctcaggccgggcctaataacatgtcggctcaggccaaaaactggctacccgggccctgctaccggcagcaacgcgtctccacgacactgtcgcaaaataacaacagcaactttgcttggaccggtgccaccaagtatcatctgaatggcagagactctctggtaaatcccggtgtcgctatggcaacgcacaaggacgacgaagagcgattttttccatccagcggagtcttgatgtttgggaaacagggagctggaaaagacaacgtggactatagcagcgttatgctaaccagtgaggaagaaatcaaaaccaccaacccagtggccacagaacagtacggcgtggtggccgataacctgcaacagcaaaacgccgctcctattgtaggggccgtcaacagtcaaggagccttacctggcatggtctggcagaaccgggacgtgtacctgcagggtcctatctgggccaagattcctcacacggacggcaactttcatccttcgccgctgatgggaggctttggactgaaacacccgcctcctcagatcctgattaagaatacacctgttcccgcggatcctccaactaccttcagtcaagccaagctggcgtcgttcatcacgcagtacagcaccggacaggtcagcgtggaaattgaatgggagctgcagaaagagaacagcaagcgctggaacccagagattcagtatacttccaactactacaaatctacaaatgtggactttgctgtcaatactgagggtacttattcagagcctcgccccattggcacccgttacctcacccgtaacctgtaattgcctgttaatcaataaaccggttaattcgtttcagttgaactttggtctctgcgaagggcgaattc

SEQ ID NO: 411 - protein, 731 aa, Artificial Sequence
  source: /note="Description of Artificial Sequence: Synthetic polypeptide"
MAADGYLPDWLEDNLSEGIREWWDLKPGAPKPKANQQKQDDGRGLVLPGYKYLGPFNGLDKGEPVNEADAAALEHDKAYDKQLEQGDNPYLKYNHADAEFQERLQEDTSFGGNLGRAVFRAKKRVLEPLGLVEEGAKTAPGKKRPIESPDSSTGIGKKGQQPAKKKLNFGQTGDSESVPDPQPLGEPPAAPSGLGSGTMAAGGGAPMADNNEGADGVGNASGNWHCDSTWLGDRVITTSTRTWALPTYNNHLYKQISSQSGATNDNHFFGYSTPWGYFDFNRFHCHFSPRDWQRLINNNRGFRPRKLRFKLFNIQVKEVTTNDGVTTIANNLTSTIQVFSDSEYQLPYVLGSAHQGCLPPFPADVFMIPQYGYLTLNNGSQSVGRSSFYCLEYFPSQMLRTGNNFEFSYQFEDVPFHSSYAHSQSLDRLMNPLIDQYLYYLSRTQSTGGTAGTQQLLFSQAGPNNMSAQAKNWLPGPCYRQQRVSTTLSQNNNSNFAWTGATKYHLNGRDSLVNPGVAMATHKDDEERFFPSSGVLMFGKQGAGKDNVDYSSVMLTSEEEIKTTNPVATEQYGVVADNLQQQNAAPIVGAVNSQGALPGMAWQNRDVYLQGPIWAKIPHTDGNFHPSPLMGGFGLKHPPPQILIKNTPVPADPPTTFSQAKLASFITQYSTGQVSVEIEWELQKENSKRWNPEIQYTSNYYKSTNVDFAVNTEGTYSEPRPIGTRYLTRNL

SEQ ID NO: 412 - DNA, 3106 bp, Artificial Sequence
  source: /note="Description of Artificial Sequence: Synthetic polynucleotide"
gaattcgcccttctacggctgcgtcaactggaccaatgagaactttcccttcaacgattgcgtcgacaagatggtgatctggtgggaggagggcaagatgacggccaaggtcgtggagtccgccaaggccattctcggcggcagcaaggtgcgcgtggaccaaaagtgcaagtcgtccgcccagatcgaccccacccccgtgatcgtcacctccaacaccaacatgtgcgccgtgattgacgggaacagcaccaccttcgagcaccagcagccgttgcaggaccggatgttcaaatttgaactcacccgccgtctggagcatgactttggcaaggcgacaaagcaggaagtcaaagagttcttccgctgggcgcaggatcacgtgaccgaggtggcgcatgagttctacgtcagaaagggtggagccaacaagagacccgcccccgatgacgcggataaaagcgagcccaagcgggcccgcccctcagtcgcggatccatcgacgtcagacgcggaaggagctccggtggactttgccgacaggtaccaaaacaaatgttctcgtcacgcgggcatgcttcagatgctgtttccctgcaaaacatgcgagagaatgaatcagaatttcaacatttgcttcacgcacgggaccagagactgttcagaatgtttccccggcgtgtcagaatctcaaccggtcgtcagaaagaggacgtatcggaaactctgtgccattcatcatctgctggggcgggctcccgagattgcttgctcggcctgcgatctggtcaacgtggacctggatgactgtgtttctgagcaataaatgacttaaaccaggtatggctgccgatggttatcttccagattggctcgaggacaacctctctgagggcattcgcgagtggtgggacttgaaacctggagccccgaaacccaaagccaaccagcaaaagcaggacgacggccggggtctggtgcttcctggctacaagtacctcggacccttcaacggactcgacaagggagagccggtcaacgaggcagacgccgcggccctcgagcacgacaaggcctacgacaagcagctcgagcagggggacaacccgtacctcaagtacaaccacgccgacgccgagtttcaggagcgtcttcaagaagatacgtcttttgggggcaacctcgggcgagcagtcttccgggccaagaagcgggttctcgaacctctcggtctggttgaggaaggcgctaagacggctcctggaaagaagagacccatagaatcccccgactcctccacgggcatcggcaagaaaggccagcagcccgctaaaaagaagctcaactttgggcagactggcgactcagagtcagtgcccgacccccaacctctcggagaacctcccgccgcgccctcaggtctgggatctggtacaatggctgcaggcggtggcgcaccaatggcagacaataacgaaggcgccgacggagtgggtaatgcctccggaaattggcattgcgattccacatggctgggcgacagagtcatcaccaccagcacccgcacctgggccctgcccacctacaacaaccacctctacaagcagatatcaagtcagagcggggctaccaacgacaaccacttcttcggctacagcaccccctggggctattttgacttcaacagattccactgccacttctcaccacgtgactggcagcgactcatcaacaacaaccggggattccggcccagaaagctgcggttcaagttgttcaacatccaggtcaaggaggtcacgacgaacgacggcgttacgaccatcgctaataaccttaccagcacgattcaggtcttctcggactcggagtaccaactgccgtacgtcctcggctctgcgcaccagggctgcctccctccgttccctgcggacgtgttcatgattcctcagtacggatatctgactctaaacaacggcagtcagtctgtgggacgttcctccttctactgcctggagtactttccttctcagatgctgagaacgggcaataactttgaattcagctaccagtttgaggacgtgccctttcacagcagctacgcgcacagccaaagcctggaccggctgatgaaccccctcatcgaccagtacctgtactacctgtctcggactcagtccacgggaggtaccgcaggaactcagcagttgctattttctcaggccgggcctaataacatgtcggctcaggccaaaaactggctacccgggccctgctaccggcagcaacgcgtctccacgacactgtcgcaaaataacaacagcaactttgcttggaccggtgccaccaagtatcatctgaatggcagagactctctggtaaatcccggtgtcgctatggcaacgcacaaggacgacgaagagcgattttttccatccagcggagtcttgatgtttgggaaacagggagctggaaaagacaacgtggactatagcagcgttatgctaaccagtgaggaagaaatcaaaaccaccaacccagtggccacagaacagtacggcgtggtggccgataacctgcaacagcaaaacgccgctcctattgtaggggccgtcaacagtcaaggagccttacctggcatggcctggcagaaccgggacgtgtacctgcagggtcctatctgggccaagattcctcacacggacggcaactttcatccttcgccgctgatgggaggctttggactgaaacacccgcctcctcagatcctgattaagaatacacctgttcccgcggatcctccaactaccttcagtcaagccaagctggcgtcgttcatcacgcagtacagcaccggacaggtcagcgtggaaattgaatgggagctgcagaaagagaacagcaagcgctggaacccagagattcagtatacttccaactactacaaatctacaaatgtggactttgctgtcaatactgagggtacttattcagagcctcgccccattggcacccgttacctcacccgtaacctgtaattgcctgttaatcaataaaccggttaattcgtttcagttgaactttggtctctgcgaagggcgaattc

SEQ ID NO: 413 - protein, 738 aa, Artificial Sequence
  source: /note="Description of Artificial Sequence: Synthetic polypeptide"
MAADGYLPDWLEDNLSEGIREWWDLKPGAPKPKANQQKQDDGRGLVLPGYKYLGPFNGLDKGEPVNEADAAALEHDKAYDKQLEQGDNPYLKYNHADAEFQERLQEDTSFGGNLGRAVFQAKKRVLEPLGLVEEGAKTAPGKKRPVEPSPQRSPDSSTGIGKTGQQPAKKRLNFGQTGDSESVPDPQPIGEPPAGPSGLGSGTMAAGGGAPMADNNEGADGVGSSSGNWHCDSTWLGDRVITTSTRTWALPTYNNHLYKQISNGTSGGSTNDNTYFGYSTPWGYFDFNRFHCHFSPRDWQRLINNNWGFRPKRLNFKLFNIQVKEVTQNEGTKTIANNLTSTIQVFTDSEYQLPYVLGSAHQGCLPPFPADVFMIPQYGYLTLNNGSQAVGRSSFYCLEYFPSQMLRTGNNFEFSYQFEDVPFHSSYAHSQSLDRLMNPLIDQYLYYLSRTQSTGGTAGTQQLLFSQAGPNNMSAQAKNWLPGPCYRQQRVSTTLSQNNNSNFAWTGATKYHLNGRDSLVNPGVAMATHKDDEERFFPSSGVLMFGKQGAGKDNVDYSSVMLTSEEEIKTTNPVATEQYGVVADNLQQQNAAPIVGAVNSQGALPGMVWQNRDVYLQGPIWAKIPHTDGNFHPSPLMGGFGLKHPPPQILIKNTPVPADPPTTFSQAKLASFITQYSTGQVSVEIEWELQKENSKRWNPEIQYTSNYYKSTNVDFAVNTEGTYSEPRPIGTRYLTRNL

SEQ ID NO: 414 - DNA, 3197 bp, Artificial Sequence
  source: /note="Description of Artificial Sequence: Synthetic polynucleotide"
gaattcgccctttctacggctgcgtcaactggaccaatgagaactttcccttcaacgattgcgtcgacaagatggtgatctggtgggaggagggcaagatgacggccaaggtcgtggagtccgccaaggccattctcggcggcagcaaggtgcgcgtggaccaaaagtgcaagtcgtccgcccagatcgaccccacccccgtgatcgtcacctccaacaccaacatgtgcgccgtgattgacgggaacagcaccaccttcgagcaccagcagccgttacaagaccggatgttcaaatttgaactcacccgccgtctggagcacgactttggcaaggtgacaaagcaggaagtcaaagagttcttccgctgggcgcaggatcacgtgaccgaggtggcgcatgagttctacgtcagaaagggtggagccaacaagagacccgcccccgatgacgcggataaaagcgagcccaagcgggcctgcccctcagtcgcggatccatcgacgtcagacgcggaaggagctccggtggactttgccgacaggtaccaaaacaaatgttctcgtcacgcgggcatgcttcagatgctgtttccctgcaagacatgcgagagaatgaatcagaatttcaacatttgcttcacgcacgggaccagagactgttcagaatgtttccccggcgtgtcagaatctcaaccggtcgtcagaaagaggacgtatcggaaactctgtgccattcatcatctgctggggcgggctcccgagattgcttgctcggcctgcgatctggtcaacgtggacctggatgactgtgtttctgagcaataaatgacttaaaccaggtatggctgccgatggttatcttccagattggctcgaggacaacctctctgagggcattcgcgagtggtgggacttgaaacctggagccccgaaacccaaagccaaccagcaaaagcaggacgacggccggggtctggtgcttcctggctacaagtacctcggacccttcaacggactcgacaagggagagccggtcaacgaggcagacgccgcggccctcgagcacgacaaggcctacgacaagcagctcgagcagggggacaacccgtacctcaagtacaaccacgccgacgccgagtttcaggagcgtcttcaagaagatacgtcttttgggggcaacctcgggcgagcagtcttccaggccaagaagcgggttctcgaacctctcggtctggttgaggaaggcgctaagacggctcctggaaagaagagaccggtagagccatcaccccagcgttctccagactcctctacgggcatcggcaagacaggccagcagcccgcgaaaaagagactcaactttgggcagactggcgactcagagtcagtgcccgaccctcaaccaatcggagaaccccccgcaggcccctctggtctgggatctggtacaatggctgcaggcggtggcgctccaatggcagacaataacgaaggcgccgacggagtgggtagttcctcaggaaattggcattgcgattccacatggctgggcgacagagtcatcaccaccagcacccgaacctgggccctccccacctacaacaaccacctctacaagcaaatctccaacgggacatcgggaggaagcaccaacgacaacacctacttcggctacagcaccccctgggggtattttgactttaacagattccactgccacttctcaccacgtgactggcagcgactcatcaacaacaactggggattccggcccaagagactcaacttcaagctcttcaacatccaggtcaaggaggtcacgcagaatgaaggcaccaagaccatcgccaataaccttaccagcacgattcaggtctttacggactcggaataccagctcccgtacgtcctcggctctgcgcaccagggctgcctgcctccgttcccggcggacgtcttcatgattcctcagtacgggtacctgactctgaacaacggcagtcaggccgtgggccgttcctccttctactgcctggagtactttccttctcaaatgctgagaacgggcaacaactttgagttcagctaccagtttgaggacgtgccttttcacagcagctacgcgcacagccaaagcctggaccggctgatgaaccccctcatcgaccagtacctgtactacctgtctcggactcagtccacgggaggtaccgcaggaactcagcagttgctattttctcaggccgggcctaataacatgtcggctcaggccaaaaactggctacccgggccctgctaccggcagcaacgcgtctccacgacactgtcgcaaaataacaacagcaactttgcttggaccggtgccaccaagtatcatctgaatggcagagactctctggtaaatcccggtgtcgctatggcaacgcacaaggacgacgaagagcgattttttccatccagcggagtcttgatgtttgggaaacagggagctggaaaagacaacgtggactatagcagcgttatgctaaccagtgaggaagaaatcaaaaccaccaacccagtggccacagaacagtacggcgtggtggccgataacctgcaacagcaaaacgccgctcctattgtaggggccgtcaacagtcaaggagccttacctggcatggtctggcagaaccgggacgtgtacctgcagggtcctatctgggccaagattcctcacacggacggcaactttcatccttcgccgctgatgggaggctttggactgaaacacccgcctcctcagatcctgattaagaatacacctgttcccgcggatcctccaactaccttcagtcaagccaagctggcgtcgttcatcacgcagtacagcaccggacaggtcagcgtggaaattgaatgggagctgcagaaagagaacagcaagcgctggaacccagagattcagtatacttccaactactacaaatctacaaatgtggactttgctgtcaatactgagggtacttattcagagcctcgccccattggcacccgttacctcacccgtaacctgtaattgcctgttaatcaataaaccggttaattcgtttcagttgaactttggtctctgcgaagggcgaattcgtttaaacctgcaggactagtccctttagtgagggttaattctgagcttggcgtaatcatgggtcatag

SEQ ID NO: 415 - protein, 735 aa, Artificial Sequence
  source: /note="Description of Artificial Sequence: Synthetic polypeptide"
MAADGYLPDWLEDNLSEGIREWWDLKPGAPKPKANQQKQDDGRGLVLPGYKYLGPFNGLDKGEPVNEADAAALEHDKAYDKQLEQGDNPYLKYNHADAEFQERLQEDTSFGGNLGRAVFQAKKRVLEPLGLVEEGAKTAPGKKRPVEPSPQRSPDSSTGIGKTGQQPAKKRLNFGQTGDSESVPDPQPIGEPPAGPSGLGSGTMAAGGGAPMADNNEGADGVGSSSGNWHCDSTWLGDRVITTSTRTWALPTYNNHLYKQISNGTSGGSTNDNTYFGYSTPWGYFDFNRFHCHFSPRDWQRLINNNWGFRPRKLRFKLFNIQVKEVTTDDGVTTIANNLTSTIQVFSDSEYQLPYVLGSAHQGCLPPFPADVFMIPQYGYLTLNNGSQSVGRSSFYCLEYFPSQMLRTGNNFEFSYTFEEVPFHSSYAHSQSLDRLMNPLIDQYLYYLARTQSTTGSTRELQFHQAGPNTMAEQSKNWLPGPCYRQQRLSKNIDSNNNSNFAWTGATKYHLNGRNSLTNPGVAMATNKDDEDQFFPINGVLVFGKTGAANKTTLENVLMTSEEEIKTTNPVATEEYGVVSSNLQSSTAGPQTQTVNSQGALPGMVWQNRDVYLQGPIWAKIPHTDGNFHPSPLMDGFGLKHPPPQILIKNTPVPANPPEVFTPAKFASFITQYSTGQVSVEIEWELQKENSKRWNPEIQYTSNYAKSNNVEFAVNNEGVYTEPRPIGTRYLTRNL

SEQ ID NO: 416 - DNA, 3276 bp, Artificial Sequence
  source: /note="Description of Artificial Sequence: Synthetic polynucleotide"
gaattcgcccttcgcagagaccaaagttcaactgaaacgaattaaccggtttattgattaacaggcaattacaggttacgggtgaggtaacgggtgccaatggggcgaggctcagtataaaccccttcgttgttgacagcaaattccacattattagacttggcataatttgaggtgtactgaatctctggattccagcgtttgctgttttctttctgcagttcccactcgatctccacgctgacctggccggtgctgtactgcgtgataaatgaggcaaacttggcaggagtaaacacctctggaggattagcaggtaccggggtgtttttgatgagaatttgaggaggcgggtgtttgagtccaaatccgtccatcaggggagacgggtgaaagttgccgtccgtgtgaggaattttggcccagatgggaccctgcaggtacacgtcccggttctgccagaccatgccgggcagagccccctggctgttgacagtctgtgtctggggtccggccgtagacgattgcaggttgctggagaccacaccgtattcttctgtagccacgggattggtggttttgatctcctcctcgctggtcattagcacgttttccagcgttgtcttgttggcagcccccgttttgccaaaaaccagcactccgttgatgggaaagaactggtcctcgtcgtccttgttggtggccatggctacgcccgggttggttaatgaatttctaccattcagatggtatttagtggccccggtccaggcaaagttactgttgttgttgctgtctatgttttttgacagtctctgctgccgataacagggtccgggcagccagttctttgattgctcggccatggtgttgggcccagcctgatggaactgcagctcccttgtggaccccgtagtgctctgggtccgggccaggtagtacaggtactggtcgatgaggggattcatcagccggtccaggctctggctatgcgcatagctgctgtggaaaggcacttcctcaaaggtgtagctgaattcaaagttattgcccgttctcagcatctgagaaggaaagtactccaggcagtagaaggaggaacgtcccacagactgactgccgttgtttagagtcagatatccgtactgaggaatcatgaacacgtccgcagggaacggagggaggcagccctggtgcgcagagccgaggacgtacggcagttggtactccgagtccgagaagacctgaatcgtgctggtaaggttattagcgatggtcgtaacgccgtcgtccgtcgtgacctccttgacctggatgttgaacaacttgaaccgcagctttctgggccggaatccccagttgttgttgatgagtcgctgccagtcacgtggtgagaagtggcagtggaatctgttaaagtcaaaatacccccagggggtgctgtagccgaagtaggtgttgtcgttggtgcttcctcccgatgtcccgttggagatttgcttgtagaggtggttgttgtaggtggggagggcccaggttcgggtgctggtggtgatgactctgtcgcccagccatgtggaatcgcaatgccaatttcctgaggaactacccactccgtcggcgccttcgttattgtctgccattggagcgccaccgcctgcagccattgtaccagatcccagaccagaggggcctgcggggggttctccgattggttgagggtcgggcactgactctgagtcgccagtctgcccaaagttgagtctctttttcgcgggctgctggcctgtcttgccgatgcccgtagaggagtctggagaacgctggggtgatggctctaccggtctcttctttccaggagccgtcttagcgccttcctcaaccagaccgagaggttcgagaacccgcttcttggcctggaagactgctcgcccgaggttgcccccaaaagacgtatcttcttgaagacgctcctgaaactcggcgtcggcgtggttgtacttgaggtacgggttgtccccctgctcgagctgcttgtcgtaggccttgtcgtgctcgagggccgcggcgtctgcctcgttgaccggctctcccttgtcgagtccgttgaagggtccgaggtacttgtagccaggaagcaccagaccccggccgtcgtcctgcttttgctggttggctttgggtttcggggctccaggtttcaagtcccaccactcgcgaatgccctcagagaggttgtcctcgagccaatctggaagataaccatcggcagccatacctggtttaagtcatttattgctcagaaacacagtcatccaggtccacgttgaccagatcgcaggccgagcaagcaatctcgggagcccgccccagcagatgatgaatggcacagagtttccgatacgtcctctttctgacgaccggttgagattctgacacgccggggaaacattctgaacagtctctggtcccgtgcgtgaagcaaatgttgaaattctgattcattctctcgcatgtcttgcagggaaacagcatctgaagcatgcccgcgtgacgagaacacttgttttggtacctgtcggcaaagtccaccggagctccttccgcgtctgacgtcgatggatgcaaaatgtcgcaaaagcactcacgtgacagctaatacaggaccactcccctatgacgtgatttacgtcagcgctatgcccgcgtgacgagaacatttgttttggtacctgtcggcaaagtccaccggagctccttccgcgtctgacgtcgatggatccgcgactgaggggcaggcccgcttgggctcgcttttatccgcgtcatcgggggcgggtctcttgttggctccaccctttctgacgtagaactcatgcgccacctcggtcacgtgatcctgcgcccagcggaagaactctttgacttcctgctttgtcaccttgccaaagtcatgctccagacggcgggtgagttcaaatttgaacatccggtcctgcaacggctgctggtgctcgaaggtggtgctgttcccgtcaatcacggcgcacatgttggtgttggaagtgacgatcacgggggtgggatcgatctgggcggaagacttgcacttttggtccacgcgcaccttgctgccgccgagaatggccttggcggactccacgaccttggccgtcatcttgccctcctcccaccagatcaccatcttgtcgacgcaatcgttgaagggaaagttctcattggtccagttgacgcagccgtagaaagggcgaattc

SEQ ID NO: 417 - protein, 738 aa, Artificial Sequence; identical to SEQ ID NO: 82
  source: /note="Description of Artificial Sequence: Synthetic polypeptide"

SEQ ID NO: 418 - protein, 738 aa, Artificial Sequence
  source: /note="Description of Artificial Sequence: Synthetic polypeptide"
MAADGYLPDWLEDNLSEGIREWWDLKPGAPKPKANQQKQDDGRGLVLPGYKYLGPFNGLDKGEPVNAADAAALEHDKAYDQQLKAGDNPYLRYNHADAEFQERLQEDTSFGGNLGRAVFQAKKRVLEPLGLVEEGAKTAPGKKRPVEPSPQRSPDSSTGIGKKGHQPARKRLNFGQTGDSESVPDPQPIGEPPAGPSGLGSGTMAAGGGAPMADNNEGADGVGSSSGNWHCDSTWLGDRVITTSTRTWALPTYNNHLYKQISNGTSGGSTNDNTYFGYSTPWGYFDFNRFHCHFSPRDWQRLINNNWGFRPKRLNFKLFNIQVKEVTQNEGTKTIANNLTSTIQVFTDSEYQLPYVPGSAHQGCLPPFPADVFMIPQYGYLTLNNGSQAVGRSSFYCLEYFPSQMLRTGNNFEFSYTFEDVPFHSSYAHSQSLDRLMNPLIDQYLYYLSRTQSTGGTQGTQQLLFSQAGPANMSAQAKNWLPGPCYRQQRVSTTLSQNNNSNFAWTGATKYHLNGRDSLVNPGVAMATHKDDEERFFPSSGVLMFGKQGAGKDNVDYSSVMLTSEEEIKTTNPVATEQYGVVADNLQQTNGAPIVGTVNSQGALPGMVWQNRDVYLQGPIWAKIPHTDGNFHPSPLMGGFGLKHPPPQILIKNTPVPADPPTTFSQAKLASFITQYSTGQVSVEIEWELQKENSKRWNPEIQYTSNYYKSTNVDFAVNTEGTYSEPRPIGTRYLTRNL

SEQ ID NO: 419 - protein, 738 aa, Artificial Sequence; identical to SEQ ID NO: 80
  source: /note="Description of Artificial Sequence: Synthetic polypeptide"

SEQ ID NO: 420 - protein, 728 aa, Artificial Sequence
  source: /note="Description of Artificial Sequence: Synthetic polypeptide"
MAADGYLPDWLEDNLSEGIREWWDLKPGAPKPKANQQKQDDGRGLVLPGYKYLGPFNGLDKGEPVNEADAAALEHDKAYDKQLEQGDNPYLKYNHADAEFQERLQEDTSFGGNLGRAVFQAKKRVLEPLGLVEEGAKTAPGKKRPIESPDSSTGIGRKGQQPAKKKLNFGQTGDSESVPDPQPIGEPPAGPSGLGSGTMAAGGGAPMADNNEGADGVGNASGNWHCDSTWLGDRVITTSTRTWALPTYNNHLYKQISSQSGATNDNHFFGYSTPWGYFDFNRFHCHFSPRDWQRLINNNWGFRPRKLRFKLFNIQVKEVTTNDGVTTIANNLTSTIQVFSDSEYQLPYVLGSAHQGCLPPFPADVFMIPQYGYLTLNNGSQSVGRSSFYCLEYFPSQMLRTGNNFEFSYTFEEVPFHSSYAHSQSLDRLMNPLIDQYLYYLARTQSTTGSTRELQFHQAGPNTMAEQSKNWLPGPCYRQQRLSKNIDSNNNSNFAWTGATKYHLNGRNSLTNPGVAMATNKDDEDQFFPINGVLVFGKTGAANKTTLENVLMTSEEEIKTTNPVATEEYGVVSSNLQSSTAGPQTQTVNSQGALPGMVWQNRDVYLQGPIWAKIPHTDGNFHPSPLMGGFGLKHPPPQILIKNTPVPANPPEVFTPAKFASFITQYSTGQVSVEIEWELQKENSKRWNPEIQYTSNYAKSNNVEFAVNNEGVYTEPRPIGTRYLTRNL

SEQ ID NO: 421 - DNA, 2489 bp, Artificial Sequence
  source: /note="Description of Artificial Sequence: Synthetic polynucleotide"
gaattcgccctttctacggctgcgtcaactggaccaatgagaactttcccttcaacgattgcgtcgacaagatggtgatctggtgggaggagggcaagatgacggccaaggtcgtgaagtccgccaaggccattcatcatctgctggggcgggctcccgagattgcttgctcggcctgcgatctggtcaacgtggacctggatgactgtgtttctgagcaataaatgacttaaaccaggtatggctgccgatggttatcttccagattggctcgaggacaacctctctgagggcattcgcgagtggtgggacttgaaacctggagccccgaaacccaaagccaaccagcaaaagcaggacgacggccggggtctggtgcttcctggctacaagtacctcggacccttcaacggactcgacaagggagagccggtcaacgaggcagacgccgcggccctcgagcacgacaaggcctacgacaagcagctcgagcagggggacaacccgtacctcaagtacaaccacgccgacgccgagtttcaggagcgtcttcaagaagatacgtcttttgggggcaacctcgggcgagcagtcttccaggccaagaagcgggttctcgaacctctcggtctggttgaggaaggcgctaagacggctcctggaaagaagagacccatagaatcccccgactcctccacgggcatcggcaggaaaggccagcagcccgctaaaaagaagctcaactttgggcagactggcgactcagagtcagtgcccgaccctcaaccaatcggagaaccccccgcaggcccctctggtctgggatctggtacaatggctgcaggcggtggcgctccaatggcagacaataacgaaggcgccgacggagtgggtaatgcctccggaaattggcattgcgattccacatggctgggcgacagagtcatcaccaccagcacccgcacctgggccctgcccacctacaacaaccacctctacaagcagatatcaagtcagagcggggctaccaacgacaaccacttcttcggctacagcaccccctggggctattttgacttcaacagattccactgccacttctcaccacgtgactggcagcgactcatcaacaacaactggggattccggcccagaaagctgcggttcaagttgttcaacatccaggtcaaggaggtcacgacgaacgacggcgttacgaccatcgccaataaccttaccagcacgattcaggtcttctcggactcggagtaccaactgccgtacgtcctcggctctgcgcaccagggctgcctccctccgttccctgcggacgtgttcatgattcctcagtacggatatctgactctaaacaacggcagtcagtctgtgggacgttcctccttctactgcctggagtactttccttctcagatgctgagaacgggcaataactttgaattcagctacacctttgaggaagtgcctttccacagcagctatgcgcacagccagagcctggaccggctgatgaatcccctcatcgaccagtacctgtactacctggcccggacccagagcactacggggtccacaagggagctgcagttccatcaggctgggcccaacaccatggccgagcaatcaaagaactggctgcccggaccctgttatcggcagcagagactgtcaaaaaacatagacagcaacaacaacagtaactttgcctggaccggggccactaaataccatctgaatggtagaaattcattaaccaacccgggcgtagccatggccaccaacaaggacgacgaggaccagttctttcccatcaacggagtgctggtttttggcaaaacgggggctgccaacaagacaacgctggaaaacgtgctaatgaccagcgaggaggagatcaaaaccaccaatcccgtggctacagaagaatacggtgtggtctccagcaacctgcaatcgtctacggccggaccccagacacagactgtcaacagccagggggctctgcccggcatggtctggcagaaccgggacgtgtacctgcagggtcccatctgggccaaaattcctcacacggacggcaactttcacccgtctcccctgatgggcggatttggactcaaacacccgcctcctcaaattctcatcaaaaacaccccggtacctgctaatcctccagaggtgtttactcctgccaagtttgcctcatttatcacgcagtacagcaccggccaggtcagcgtggagatcgagtgggaactgcagaaagaaaacagcaaacgctggaatccagagattcagtacacctcaaattatgccaagtctaataatgtggaatttgctgtcaacaacgaaggggtttatactgagcctcgccccattggcacccgttacctcacccgtaacctgtaattgcctgttaatcaataaaccggttaattcgtttcagttgaactttggtcaagggcgaattc

SEQ ID NO: 422 - protein, 728 aa, Artificial Sequence
  source: /note="Description of Artificial Sequence: Synthetic polypeptide"
MAADGYLPDWLEDNLSEGIREWWDLKPGAPKPKANQQKQDDGRGLVLPGYKYLGPFNGLDKGEPVNAADAAALEHDKAYDQQLKAGDNPYLRYNHADAEFQERLQEDTSFGGNLGRAVFQAKKRVLEPLGLVEEGAKTAPGKKRPIESPDSSTGIGKKGQQPAKKKLNFGQTGDSESVPDPQPIGEPPAGPSGLGSGTMAAGGGAPMADNNEGADGVGNASGNWHCDSTWLGDRVITTSTRTWALPTYNNHLYKQISSQSGATNDNHFFGYSTPWGYFDFNRFHCHFSPRDWQRLINNNWGFRPRKLRFKLFNIQVKEVTTNDGVTTIANNLTSTIQVFSDSEYQLPYVLGSAHQGCLPPFPADVFMIPQYGYLTLNNGSQSVGRSSFYCLEYFPSQMLRTGNNFEFSYTFEEVPFHSSYAHSQSLDRLMNPLIDQYLYYLARTQSTTGSTRELQFHQAGPNTMAEQSKNWLPGPCYRRQRLSKDIDSNNNSNFAWTGATKYHLNGRNSLTNPGVAMATNKDDEDQFFPINGVLVFGKTGAANKTTLENVLMTSEEEIKTTNPVATEEYGVVSSNLQSSTAGPQTQTVNSQGALPGMVWQNRDVYLQGPIWAKIPHTDGNFHPSPLMGGFGLKHPPPQILIKNTPVPANPPEVFTPAKFASFITQYSTGQVSVEIEWELQKENSKRWNPEIQYTSNYAKSNNVEFAVNNEGVYTEPRPIGTRYLTRNL

SEQ ID NO: 423 - DNA, 3098 bp, Artificial Sequence
  source: /note="Description of Artificial Sequence: Synthetic polynucleotide"
gaattcgccctttctacggctgcgtcaactggaccaatgagaactttcccttcaacgattgcgtcgacaagatggtgatctggtgggaggagggcaagatgacggccaaggtcgtggagtccgccaaggccattctcggcggcagcaaggtgcgcgtggaccaaaagtgcaagtcttccgcccagatcgatcccacccccgtgatcgtcacttccaacaccaacatgtgcgccgtgattgacgggaacagcaccaccttcgagcaccagcagccgttacaagaccggatgttcaaatttgaactcacccgccgtctggagcacgactttggcaaggtgacaaagcaggaagtcaaagagttcttccgctgggcgcaggatcacgtgaccgaggtggcgcatgagttctacgtcagaaagggtggagccaacaagagacccgcccccgatgacgcggataaaagcgagcccaagcgggcctgcccctcagtcgcggatccatcgacgtcagacgcggaaggagctccggtggactttgccgacaggtaccaaaacaaatgttctcgtcacgcgggcatgcttcagatgctgtttccctgcaagacatgcgagagaatgaatcagaatttcaacatttgcttcacgcacgggaccggagactgttcagaatgtttccccggcgtgtcagaatctcaaccggtcgtcagaaagaggacgtatcggaaactctgtgccattcatcatctgctggggcgggctcccgagattgcttgctcggcctgcgatctggtcaacgtggacctggatgactgtgtttctgagcaataaatgacttaaaccaggtatggctgccgatggttatcttccagattggctcgaggacaacctctctgagggcattcgcgagtggtgggacttgaaacctggagccccgaaacccaaagccaaccagcaaaagcaggacgacggccggggtctggtgcttcctggctacaagtacctcggacccttcaacggactcgacaagggagagccggtcaacgcggcggacgcagcggccctcgagcacgacaaggcctacgaccagcagctcaaagcgggtgacaatccgtacctgcggtataaccacgccgacgccgagtttcaggagcgtcttcaagaagatacgtcttttgggggcaacctcgggcgagcagtcttccaggccaagaagcgggttctcgaacctctcggtctggttgaggaaggcgctaagacggctcctggaaagaagagacccatagaatcccccgactcctccacgggcatcggcaagaaaggccagcagcccgctaaaaagaagctcaactttgggcagactggcgactcagagtcagtgcccgaccctcaaccaatcggagaaccccccgcaggcccctctggtctgggatctggtacaatggctgcaggcggtggcgctccaatggcagacaataacgaaggcgccgacggagtgggtaatgcctccggaaattggcattgcgattccacatggctgggcgacagagtcatcaccaccagcacccgcacctgggccctgcccacctacaacaaccacctctacaagcagatatcaagtcagagcggggctaccaacgacaaccacttcttcggctacagcaccccctggggctattttgacttcaacagattccactgccacttctcaccacgtgactggcagcgactcatcaacaacaactggggattccggcccagaaagctgcggttcaagttgttcaacatccaggtcaaggaggtcacgacgaacgacggcgttacgaccatcgctaataaccttaccagcacgattcaggtcttctcggactcggagtaccaactgccgtacgtcctcggctctgcgcaccagggctgcctccctccgttccctgcggacgtgttcatgattcctcagtacggatatctgactctaaacaacggcagtcagtctgtgggacgttcctccttctactgcctggagtactttccttctcagatgctgagaacgggcaataactttgaattcagctacacctttgaggaagtgcctttccacagcagctatgcgcacagccagagcctggaccggctgatgaatcccctcatcgaccagtacctgtactacctggcccggacccagagcactacggggtccacaagggagctgcagttccatcaggctgggcccaacaccatggccgagcaatcaaagaactggctgcccggaccctgttatcggcggcagagactgtcaaaagacatagacagcaacaacaacagtaactttgcctggaccggggccactaaataccatctgaatggtagaaattcattaaccaacccgggcgtagccatggccaccaacaaggacgacgaggaccagttctttcccatcaacggagtgctggtttttggcaaaacgggggctgccaacaagacaacgctggaaaacgtgctaatgaccagcgaggaggagatcaaaaccaccaatcccgtggctacagaagaatacggtgtggtctccagcaacctgcaatcgtctacggccggaccccagacacagactgtcaacagccagggggctctgcccggcatggtctggcagaaccgggacgtgtacctgcagggtcccatctgggccaaaattcctcacacggacggcaactttcacccgtctcccctgatgggcggatttggactcaaacacccgcctcctcaaattctcatcaaaaacaccccggtacctgctaatcctccagaggtgtttactcctgccaagtttgcctcatttatcacgcagtacagcaccggccaggtcagcgtggagatcgagtgggaactgcagaaagagaacagcaaacgctggaatccagagattcagtacacctcaaattatgccaagtctaataatgtggaatttgctgtcaacaacgaaggggtttatactgagcctcgccccattggcacccgttacctcacccgtaacctgtaattacttgttaatcaataaaccggttgattcgtttcagttgaactttggtctctgcgaagggcgaattc

SEQ ID NO: 424 - protein, 685 aa, Artificial Sequence
  source: /note="Description of Artificial Sequence: Synthetic polypeptide"
MAADGYLPDWLEDNLSEGIREWWDLKPGAPKPKANQQKQDDGRGLVLPGYKYLGPFNGLDKGEPVNEADAAALEHDKAYDKQLEQGDNPYLKYNHADAEFQERLQEDTSFGGNLGRAVFQAKKRVLEPLGLVEEGAKTAPGKKRPVEPSPQRSPDSSTGIGKTGQQPAKKRLNFGQTGDSESVPDPQPIGEPPAGPSGLGSGTMAAGGGAPMADNNEGADGVGSSSGNWHCDSTWLGDRVITTSTRTWALPTYNNHLYKQISNGTSGGSTNDNTYFGYSTPWGYFDFNRFHCHFSPRDWQRLINNNWGFRPKRLNFKLFNIQVKEVTQNEGTKTIANNLTSTIQVFTDSEYQLPYVLGSAHQGCLPPFPADVFMIPQYGYLTLNNGSQAVGRSSFYCLEYFPSQMLRTGNNFEFSYQFEDVPFHSSYAHSQSLDRLTNPLIDQYLYYLARTQSTTGSTRGLQFHQAGPNTMAEQSKNWLPGPCYRQQRLSKNIDSNNNSNFAWTGATKYHLNGRNSLTNPGVAMATNKDDEDQFFPINGVLVFGKTGAANKTTLENVLMTSEEEIKTTNPVATEEYGVVSSNLQSSTAGPQTQTVNSQGALPGMVWQNRDVYLQGPIWAKIPHTDGNFHPSPLMGGFGLKHPPPQILIKYTSNYYKSTNVDFAVNTEGTYSEPRPIGTRYLTRNL

SEQ ID NO: 425 - DNA, 2969 bp, Artificial Sequence
  source: /note="Description of Artificial Sequence: Synthetic polynucleotide"
gaattcgccctttctacggctgcgtcaactggaccaatgagaactttcccttcaacgattgcgtcgacaagatggtgatctggtgggaggagggcaagatgacggccaaggtcgtggagtccgccaaggccattctcggcggcagcaaggtgcgcgtggaccaaaagtgcaagtcgtccgcccagatcgaccccacccccgtgatcgtcacctccaacaccaacatgtgcgccgtgattgacgggaacagcaccaccttcgagcaccagcagccgttacaagaccggatgttcaaatttgaactcacccgccgtctggagcacgactttggcaaggtgacaaagcaggaagtcaaagagttcttccgctgggcgcaggatcacgtgaccgaggtggcgcatgagttctacgtcagaaagggtggagccaacaagagacccgcccccgatgacgcggataaaagcgagcccaagcgggcctgcccctcagtcgcggatccatcgacgtcagacgcggaaggagctccggtggactttgccgacaggtaccaaaacaaatgttctcgtcacgcgggcatgcttcagatgctgtttccctgcaagacatgcgagagaatgaatcagaatttcaacatttgcttcacgcacgggaccagagactgttcagaatgtttccccggcgtgtcagaatctcaaccggtcgtcagaaagaggacgtatcggaaactctgtgccattcatcatctgctggggcgggctcccgagattgcttgctcggcctgcgatctggtcaacgtggacctggatgactgtgtttctgagcaataaatgacttaaaccaggtatggctgccgatggttatcttccagattggctcgaggacaacctctctgagggcatccgcgagtggtgggacttgaaacctggagccccgaaacccaaagccaaccagcaaaagcaggacgacggccggggtctggtgcttcctggctacaagtacctcggacccttcaacggactcgacaagggagagccggtcaacgaggcagacgccgcggccctcgagcacgacaaggcctacgacaagcagctcgagcagggggacaacccgtacctcaagtacaaccacgccgacgccgagtttcaggagcgtcttcaagaagatacgtcttttgggggcaacctcgggcgagcagtcttccaggccaagaagcgggttctcgaacctctcggtctggttgaggaaggcgctaagacggctcctggaaagaagagaccggtagagccatcaccccagcgttctccagactcctctacgggcatcggcaagacaggccagcagcccgcgaaaaagagactcaactttgggcagactggcgactcagagtcagtgcccgaccctcaaccaatcggagaaccccccgcaggcccctctggtctgggatctggtacaatggctgcaggcggtggcgctccaatggcagacaataacgaaggcgccgacggagtgggtagttcctcaggaaattggcattgcgattccacatggctgggcgacagagtcatcaccaccagcacccgaacctgggccctccccacctacaacaaccacctctacaagcaaatctccaacgggacatcgggaggaagcaccaacgacaacacctacttcggctacagcaccccctgggggtattttgactttaacagattccactgccacttctcaccacgtgactggcagcgactcatcaacaacaactggggattccggcccaagagactcaacttcaagctcttcaacatccaggtcaaggaggtcacgcagaatgaaggcaccaagaccatcgccaataaccttaccagcacgattcaggtctttacggactcggaataccagctcccgtacgtcctcggctctgcgcaccagggctgcctgcctccgttcccggcggacgtcttcatgattcctcagtacgggtacctgactctgaacaacggcagtcaggccgtgggccgttcctccttctactgcctggagtactttccttctcaaatgctgagaacgggcaacaactttgagttcagctaccagtttgaggacgtgccttttcacagcagctacgcgcacagccaaagcctggaccggctgacgaaccccctcatcgaccagtacctgtactacctggcccggacccagagcactacggggtccacaagggggctgcagttccatcaggctgggcccaacaccatggccgagcaatcaaagaactggctgcccggaccctgttatcggcagcagagactgtcaaaaaacatagacagcaacaacaacagtaactttgcctggaccggggccactaaataccatctgaatggtagaaattcattaaccaacccgggcgtagccatggccaccaacaaggacgacgaggaccagttctttcccatcaacggagtgctggtttttggcaaaacgggggctgccaacaagacaacgctggaaaacgtgctaatgaccagcgaggaggagatcaaaaccaccaatcccgtggctacagaagaatacggtgtggtctccagcaacctgcaatcgtctacggccggaccccagacacagactgtcaacagccagggggctctgcccggcatggtctggcagaaccgggacgtgtacctgcagggtcccatctgggccaaaattcctcacacggacggcaactttcacccgtctcccctgatgggcggatttggactcaaacacccgcctcctcaaattctcatcaagtatacttccaactactacaaatctacaaatgtggactttgctgtcaatactgagggtacttattcagagcctcgccccattggcacccgttacctcacccgtaacctgtaattgcctgttaatcaataaaccggttaattcgtttcagttgaactttggtctctgcgaagggcgaattc

SEQ ID NO: 426 - protein, 733 aa, Artificial Sequence
  source: /note="Description of Artificial Sequence: Synthetic polypeptide"
MAADGYLPDWLEDNLSEGIREWWDLKPGAPKPKANQQKQDDGRGLVLPGYKYLGPFNGLDKGEPVNAADAAALEHDKAYDQQLKAGDNPYLRYNHADAEFQERLQEDTSFGGNLGRAVFQAKKRVLEPLGLVEEGAKTAPGKKRPIESPDSSTGIGKKGQQPAKKKLNFGQTGDSESVPDPQPIGEPPAGPSGLGSGTMAAGGGAPMADNNEGADGVGSSSGNWHCDSTWLGDRVITTSTRTWALPTYNNHLYKQISNGTSGGSTNDNTYFGYSTPWGYFDFNRFHCHFSPRDWQRLINNNWGFRPKRLNFKLFNIQVKEVTQNEGTKTIANNLTSTIQVFTDSEYQLPYVLGSAHQGCLPPFPADVFMIPQYGYLTLNNGSQAVGRSSFYCLEYFPSQMLRTGNNFEFSYQFEDVPFHSSYAHSQSLDRLMNPLIDQYLYYLSRTQSTGGTAGTQQLLFSQAGPNNMSAQAKNWLPGPCYRQQRVSTTVSQNNNSNFAWTGATKYHLNGRDSLVNPGVAMATHKGDEERFFPSSGVLMFGKQGAGKDNVDYSSVMLTSEEEIKTTNPVATEQYGVVADNLQQQNAAPIVGAVNSQGALPGMVWQNRDVYLQGPIWAKIPHTDGNFHPSPLMGGFGLKHPPPQILIKNTPVPADPPTTFSQAKLASFITQYSTGQVSVEIEWELQKENSKRWNPEIQYTSNYYKSTNVDFAVNTEGTYSEPRPIGTRYLTRSL

SEQ ID NO: 427 - DNA, 3113 bp, Artificial Sequence
  source: /note="Description of Artificial Sequence: Synthetic polynucleotide"
gaattcgccctttctacggctgcgtcaactggaccaatgagaactttcccttcaacgattgcgtcgacaagatggtgatctggtgggaggagggcaagatgacggccaaggtcgtggagtccgccaaggccattctcggcggcagcaaggtgcgcgtggaccaaaagtgcaagtcgtccgcccagatcgatcccacccccgtgatcgtcacttccaacaccaacatgtgcgccgtgattgacgggaacagcaccaccttcgagcaccagcagccgttacaagaccggatgttcaaatttgaactcacccgccgtctggagcatgactttggcaaggtgacaaagcaggaagtcaaagagttcttccgctgggcgcaggatcacgtgaccgaggtggcgcatgagttctacgtcagaaagggtggagccaacaagagacccgcccccgatgacgcggataaaagcgagcccaagcgggcctgcccctcagtcgcggatccatcgacgtcagacgcggaaggagctccggtggactttgccgacaggtaccaaaacaaatgttctcgtcacgcgggcatgcttcagatgctgtttccctgcaagacatgcgagagaatgaatcagaatttcaacatttgcttcacgcacgggaccagagactgttcagaatgtttccccggcgtgtcagaatctcaaccggtcgtcagaaagaggacgtatcggaaactctgtgccattcatcatctgctggggcgggctcccgagattgcttgctcggcctgcgatctggtcaacgtggacctggatgactgtgtttctgagcaataaatgacttaaaccaggtatggctgccgatggttatcttccagattggctcgaggacaacctctctgagggcattcgcgagtggtgggacttgaaacctggagccccgaaacccaaagccaaccagcaaaagcaggacgacggccggggtctggtgcttcctggctacaagtacctcggacccttcaacggactcgacaagggggagcccgtcaacgcggcggacgcagcggccctcgagcacgacaaggcctacgaccagcagctcaaagcgggtgacaatccgtacctgcggtataaccacgccgacgccgagtttcaggagcgtcttcaagaagatacgtcttttgggggcaacctcgggcgagcagtcttccaggccaagaagcgggttctcgaacctctcggtctggttgaggaaggcgctaagacggctcctggaaagaagagacccatagaatcccccgactcctccacgggcatcggcaagaaaggccagcagcccgctaaaaagaagctcaactttgggcagactggcgactcagagtcagtgcccgaccctcaaccaatcggagaaccccccgcaggcccctctggtctgggatctggtacaatggctgcaggcggtggcgctccaatggcagacaataacgaaggcgccgacggagtgggtagttcctcaggaaattggcattgcgattccacatggctgggcgacagagtcatcaccaccagcacccgaacctgggccctccccacctacaacaaccacctctacaagcaaatctccaacgggacatcgggaggaagcaccaacgacaacacctacttcggctacagcaccccctgggggtattttgactttaacagattccactgccacttctcaccacgtgactggcagcgactcatcaacaacaactggggattccggcccaagagactcaacttcaagctcttcaacatccaggtcaaggaggtcacgcagaatgaaggcaccaagaccatcgccaataaccttaccagcacgattcaggtctttacggactcggaataccagctcccgtacgtcctcggctctgcgcaccagggctgcctgcctccgttcccggcggacgtcttcatgattcctcagtacgggtacctgactctgaacaacggcagtcaggccgtgggccgttcctccttctactgcctggagtactttccttctcaaatgctgagaacgggcaacaactttgagttcagctaccagtttgaggacgtgccttttcacagcagctatgcgcacagccaaagcctggaccggctgatgaaccccctcatcgaccagtacctgtactacctgtctcggactcagtccacgggaggtaccgcaggaactcagcagttgctattttctcaggccgggcctaataacatgtcggctcaggccaaaaactggctacccgggccctgctaccggcagcaacgcgtctccacgacagtgtcgcaaaataacaacagcaactttgcttggaccggtgccaccaagtatcatctgaatggcagagactctctggtaaatcccggtgtcgctatggcaacgcacaagggcgacgaagagcgattttttccatccagcggagtcttgatgtttgggaaacagggagctggaaaagacaacgtggactatagcagcgttatgctaaccagtgaggaagaaatcaaaaccaccaacccagtggccacagaacagtacggcgtggtggccgataacctgcaacagcaaaacgccgctcctattgtaggggccgtcaacagtcaaggagccttacctggcatggtctggcagaaccgggacgtgtacctgcagggtcctatctgggccaagattcctcacacggacggcaactttcatccttcgccgctgatgggaggctttggactgaaacacccgcctcctcagatcctgattaagaatacacctgttcccgcggatcctccaactaccttcagtcaagccaagctggcgtcgttcatcacgcagtacagcaccggacaggtcagcgtggaaattgaatgggagctgcagaaagagaacagcaagcgctggaacccagagattcagtatacttccaactactacaaatctacaaatgtggactttgctgtcaatactgagggtacttattcagagcctcgccccattggcacccgttacctcacccgtagcctgtaattgcctgttaatcaataaaccggttgattcgtttcagttgaactttggtctctgcgaagggcgaattc

SEQ ID NO: 428 - protein, 738 aa, Artificial Sequence
  source: /note="Description of Artificial Sequence: Synthetic polypeptide"
MAADGYLPDWLEDNLSEGIREWWDLKPGAPKPKANQQKQDDGRGLVLPGYKYLGPFNGLDKGEPVNAADAAALEHDKAYDQQLKAGDNPYLRYNHADAEFQERLQEDTSFGGNLGRAVFQAKKRVLEPLGLVEEGAKTAPGKKRPVEPSPQRSPDSSTGIGKTGQQPAKKRLNFGQTGDSESVPDPQPIGEPPAGPSGLGSGTMAAGGGAPMADNNEGADGVGSSSGNWHCDSTWLGDRVITTSTRTWALPTYNNHLYKQISNGTSGGSTNDNTYFGYSTPWGYFDFNRFHCHFSPRDWQRLINNNWGFRPKRLNFKLFNIQVKEVTQNEGTKTIANNLTSTIQVFTDSEYQLPYVLGSAHQGCPPPFPADVFMIPQYGYLTLNNGSQAVGRSSFYCLEYFPSQMRRTGNNFEFSYQFEDVPFHSSYAHSQSLDRLMNPLIDQYLYYLSRTQSTGGTAGTQQLLFSQAGPNNMSAQAKNWLPGPCYRQQRVSTTLSQNNNSNFAWTGATKYHLNGRDSLVNPGVAMATHKDDEERFFPSSGVLMFGKQGAGKDNVDYSSVMLTSEEEIKTTNPVATEQYGVVADNLQQQNAAPIVGAVNSQGALPGMVWQNRDVYLQGPIWAKIPHTDGNFHPSPLMGGFGLKHPPPQILIKNTPVPADPPTTFSQAKLASFITQYSTGQVSVEIEWELQKENSKRWNPEIQYTSNYYKSTNVDFAVNTEGTYSEPRPIGTRYLTRNL

SEQ ID NO: 429 - DNA, 3128 bp, Artificial Sequence
  source: /note="Description of Artificial Sequence: Synthetic polynucleotide"
gaattcgccctttctacggctgcgtcaactggaccaatgagaactttcccttcaacgattgcgtcgacaagatggtgatctggtgggaggagggcaagatgacggccaaggtcgtggagtccgccaaggccattctcggcggcagcaaggtgcgcgtggaccaaaagtgcaagtcgtccgcccagatcgaccccacccccgtgatcgtcacctccaacaccaacatgtgcgccgtgattgacgggaacagcaccaccttcgagcaccagcagccgttgcaggaccggatgttcaaatttgaactcacccgccgtctggagcatgactttggcaaggtgacaaagcaggaagtcaaagagttcttccgctgggcgcaggatcacgtgaccgaggtggcgcatgagttctacgtcagaaagggtggagccaacaagagacccgcccccgatgacgcggataaaagcgagcccaagcgggcctgcccctcagtcgcggatccatcgacgtcagacgcggaaggagctccggtggactttgccgacaggtaccaaaacaaatgttctcgtcacgcgggcatgcttcagatgctgtttccctgcaagacatgcgagagaatgaatcagaatttcaacatttgcttcacgcgcgggaccagagactgttcagaatgtttcccgggcgtgtcagaatctcaaccggtcgtcagaaagaggacgtatcggaaactctgtgccattcatcatctgctggggcgggctcccgagattgcttgctcggcctgcgatctggtcaacgtggacctggatgactgtgtttctgagcaataaatgacttaaaccaggtatggctgccgatggttatcttccagattggctcgaggacaacctctctgagggcattcgcgagtggtgggacttgaaacctggagccccgaaacccaaagccaaccagcaaaagcaggacgacggccggggtctggtgcttcctggctacaagtacctcggacccttcaacggactcgacaagggggagcccgtcaacgcggcggacgcagcggccctcgagcacgacaaggcctacgaccagcagctcaaagcgggtgacaatccgtacctgcggtataaccacgccgacgccgagtttcaggagcgtctgcaagaagatacgtcttttgggggcaacctcgggcgagcagtcttccaggccaagaagcgggttctcgaacctctcggtctggttgaggaaggcgctaagacggctcctggaaagaagagaccggtagagccatcaccccagcgttctccagactcctctacgggcatcggcaagacaggccagcagcccgcgaaaaagagactcaactttgggcagactggcgactcagagtcagtgcccgaccctcaaccaatcggagaaccccccgcaggcccctctggtctgggatctggtacaatggctgcaggcggtggcgctccaatggcagacaataacgaaggcgccgacggagtgggtagttcctcaggaaattggcattgcgattccacatggctgggcgacagagtcatcaccaccagcacccgaacctgggccctccccacctacaacaaccacctctacaagcaaatctccaacgggacatcgggaggaagcaccaacgacaacacctacttcggctacagcaccccctgggggtattttgactttaacagattccactgccacttctcaccacgtgactggcagcgactcatcaacaacaactggggattccggcccaagagactcaacttcaagctcttcaacatccaggtcaaggaggtcacgcagaatgaaggcaccaagaccatcgccaataaccttaccagcacgattcaggtctttacggactcggaataccagctcccgtacgtcctcggctctgcgcaccagggctgcccgcctccgttcccggcggacgtcttcatgattcctcagtacgggtacctgactctgaacaacggcagtcaggccgtgggccgttcctccttctactgcctggagtactttccttctcaaatgcggagaacgggcaacaactttgagttcagctaccagtttgaggacgtgccttttcacagcagctacgcgcatagccaaagcctggaccggctgatgaaccccctcatcgaccagtacctgtactacctgtctcggactcagtccacgggaggtaccgcaggaactcagcagttgctattttctcaggccgggcctaataacatgtcggctcaggccaaaaactggctacccgggccctgctaccggcagcaacgcgtctccacgacactgtcgcaaaataacaacagcaactttgcttggaccggtgccaccaagtatcatctgaatggcagagactctctggtaaatcccggtgtcgctatggcaacgcacaaggacgacgaagagcgattttttccatccagcggagtcttgatgtttgggaaacagggagctggaaaagacaacgtggactatagcagcgttatgctaaccagtgaggaagaaatcaaaaccaccaacccagtggccacagaacagtacggcgtggtggccgataacctgcaacagcaaaacgccgctcctattgtaggggccgtcaacagtcaaggagccttacctggcatggtctggcagaaccgggacgtgtacctgcagggtcctatctgggccaagattcctcacacggacggcaactttcatccttcgccgctgatgggaggctttggactgaaacacccgcctcctcagatcctgattaagaatacacctgttcccgcggatcctccaactaccttcagtcaagccaagctggcgtcgttcatcacgcagtacagcaccggacaggtcagcgtggaaattgaatgggagctgcagaaagagaacagcaagcgctggaacccagagattcagtatacttccaactactacaaatctacaaatgtggactttgctgtcaatactgagggtacttattcagagcctcgccccattggcacccgttacctcacccgtaacctgtaattgcctgttaatcaataaaccggttaattcgtttcagttgaactttggtctctgcgaagggcgaattc

SEQ ID NO: 430 - protein, 738 aa, Artificial Sequence; identical to SEQ ID NO: 418
  source: /note="Description of Artificial Sequence: Synthetic polypeptide"

SEQ ID NO: 431 - DNA, 1933 bp, Artificial Sequence
  source: /note="Description of Artificial Sequence: Synthetic polynucleotide"
  modified_base (1302)..(1302): a, c, t, or g
caaggcctacgaccagcagctcaaagcgggtgacaatccgtacctgcggtataaccacgccgacgccgagtttcaggagcgtcttcaagaagatacgtcttttgggggcaacctcgggcgagcagtcttccaggccaaaaagcgggttctcgaacctcttggtctggttgagacgccagctaagacggcacctggaaagaagcgaccggtagactcgccagactccacctcgggcatcggcaagaaaggccagcagcccgcgaaaaagagactcaactttgggcagactggcgactcagagtcagtccccgaccctcaaccaatcggagaaccaccagcaggcccctctggtctgggatctggtacaatggctgcaggcggtggcgcaccaatggctgacaataacgagggcgccgacggagtgggtaatgcctcaggaaattggcattgcgattccacatggctgggcgacagagtcatcaccaccagcacccgaacctgggccctgcccacctacaacaaccacctctacaagcaaatctccagtcagtcagcagggagcaccaacgataacgtctatttcggctacagcaccccctgggggtattttgacttcaacagattccattgccacttctcaccacgtgactggcagcgacttatcaacaacaactggggattccggcccaagaagctcaacttcaagctcttcaacatccaggtcaaggaggtcacgacgaatgacggtgtcacaaccatcgctaataaccttaccagcacggttcaggtcttttcggactcggaatatcaactgccgtacgtcctcggctccgcgcaccagggctgcctgcctccgttcccggcagacgtgttcatgattccgcagtacggatacctgactctgaacaatggcagccaatcggtaggccgttcctccttctactgcctggagtactttccttctcagatgctgagaacgggcaacaacttcacctttagctacaccttcgaggacgtgcctttccacagcagctacgcgcacagccagagtctggaccggctgatgaatcccctcatcgaccagtacctgtactacttggccagaacacagagcaacgcaggaggtactgctggcaatcgggaactgcagttttatcagggcggacctaccaccatggccgaacaagcaaagaactggctgcccggaccttgcttccggcaacagagagtatccaagacgctggatcaaaataacaacagcaactttgcctggactggtgccacaaaataccatttaaatgnaagaaattcattggttaatcccggtgtcgccatggcaacccacaaggacgacgaggaacgcttcttcccttcgagcggagttctaatttttggcaaaactggagcagctaataaaactacattagaaaacgtgctcatgacaaatgaagaagaaattcgtcctaccaacccggtagctaccgaggaatacgggattgtaagcagcaacttgcaggcggctagcaccgcagcccagacacaagttgttaacaaccagggagccttacctggcatggtctggcagaaccgggacgtgtacctgcaaggtcccatttgggccaagattcctcacacggacggcaactttcacccgtctcctctaatgggtggctttggactgaaacacccgcctccccagatcctgatcaaaaacacaccggtacctgctaatcctccagaagtgtttactcctgccaagtttgcttccttcatcacgcagtacagcaccgggcaagtcagcgttgagatcgagtgggagctgcagaaagagaacagcaagcgctggaacccagagattcagtacacctccaactttgacaaacagactggagtggactttgctgttgacagccagggtgtttactctgagcct

SEQ ID NO: 432 - protein, 733 aa, Artificial Sequence
  source: /note="Description of Artificial Sequence: Synthetic polypeptide"
MAADGYLPDWLEDNLSEGIREWWDLKPGAPKPKANQQKQDDGRGLVLPGYKYLGPFNGLDKGEPVNAADAAALEHDKAYDQQLKAGDNPYLRYNHADAEFQERLQEDTSFGGNLGRAVFQAKKRVLEPLGLVEEGAKTAPGKKRPLESPQEPDSSSGIGKKGKQPAKKRLNFEEDTGAGDGPPEGSDTSAMSSDIEMRAAPGGNAVDAGQGSDGVGNASGDWHCDSTWSEGKVTTTSTRTWVLPTYNNHLYLRLGTTSNSNTYNGFSTPWGYFDFNRFHCHFSPRDWQRLINNNWGLRPKAMRVKIFNIQVKEVTTSNGETTVANNLTSTVQIFADSSYELPYVMDAGQEGSLSPFPNDVFMVPQYGYCGIVTGENQNQTDRNAFYCLEYFPSQMLRTGNNFEMAYNFGKVPFHSMYAYSQSPDRLMNPLLDQYLWHLQSTTSGETLNQGNAATTFGKIRSGDFAFYRKNWLPGPCVKQQRLSKTASQNYKIPASGGNALLKYDTHYTLNNRWSNIAPGPPMATAGPSDGDFSNAQLIFPGPSVTGNTTTSANNLLFTSEEEIAATNPRDTDMFGQIADNNQNATTAPITGNVTAMGVLPGMVWQNRDIYYQGPIWAKIPHADGHFHPSPLIGGFGLKHPPPQIFIKNTPVPANPATTFTAARVDSFITQYSTGQVAVQIEWEIEKERSKRWNPEVQFTSNYGNQSSMLWAPDTTGKYTEPRVIGSRYLTNHL

SEQ ID NO: 433 - DNA, 3105 bp, Artificial Sequence
  source: /note="Description of Artificial Sequence: Synthetic polynucleotide"
gaattcgcccttgctgcgtcaactggaccaatgagaactttcccttcaacgattgcgtcgacaagatggtgatctggtgggaggagggcaagatgaccgccaaggtcgtggagtccgccaaggccattctgggcggaagcaaggtgcgcgtggaccaaaagtgcaagtcatcggcccagatcgaccccacgcccgtgatcgtcacctccaacaccaacatgtgcgccgtgatcgacgggaacagcaccaccttcgagcaccagcagccgctgcaggaccgcatgttcaagttcgagctcacccgccgtctggagcacgactttggcaaggtgaccaagcaggaagtcaaagagttcttccgctgggctcaggatcacgtgactgaggtggcgcatgagttctacgtcagaaagggcggagccaccaaaagacccgcccccagtgacgcggatataagcgagcccaagcgggcctgcccctcagttgcggagccatcgacgtcagacgcggaagcaccggtggactttgcggacaggtaccaaaacaaatgttctcgtcacgcgggcatgcttcagatgctgtttccctgcaagacatgcgagagaatgaatcagaatttcaacgtctgcttcacgcacggggtcagagactgctcagagtgcttccccggcgcgtcagaatctcaacccgtcgtcagaaaaaagacgtatcagaaactgtgcgcgattcatcatctgctggggcgggcacccgagattgcgtgttcggcccgcgatctcgtcaacgtggacttggatgactgtgtttctgagcaataaatgacttaaaccaggtatggctgctgacggttatcttccagattggctcgaggacaacctctctgagggcattcgcgagtggtgggacctgaaacctggagcccccaagcccaaggccaaccagcagaagcaggacgacggccggggtctggtgcttcctggctacaagtacctcggacccttcaacggactcgacaagggggagcccgtcaacgcggcggacgcagcggccctcgagcacgacaaggcctacgaccagcagctcaaagcgggtgacaatccgtacctgcggtataaccacgccgacgccgagtttcaggagcgtctgcaagaagatacgtcttttgggggcaacctcgggcgagcagtcttccaggccaagaagagggtactcgaacctctgggcctggttgaagaaggtgctaagacggctcctggaaagaagagaccgttagagtcaccacaagagcccgactcctcctcaggaatcggcaaaaaaggcaaacaaccagccaaaaagagactcaactttgaagaggacactggagccggagacggaccccctgaaggatcagataccagcgccatgtcttcagacattgaaatgcgtgcagcaccgggcggaaatgctgtcgatgcgggacaaggttccgatggagtgggtaatgcctcgggtgattggcattgcgattccacctggtctgagggcaaggtcacaacaacctcgaccagaacctgggtcttgcccacctacaacaaccacttgtacctgcggctcggaacaacatcaaacagcaacacctacaacggattctccaccccctggggatactttgactttaacagattccactgtcacttctcaccacgtgactggcaaagactcatcaacaacaactggggactacgaccaaaagccatgcgcgttaaaatcttcaatatccaagttaaggaggtcacaacgtcgaacggcgagactacggtcgctaataaccttaccagcacggttcagatatttgcggactcgtcgtatgagctcccgtacgtgatggacgctggacaagagggaagtctgtctcctttccccaatgacgtcttcatggtgcctcaatatggctactgtggcattgtgactggcgaaaatcagaaccagacggacagaaatgctttctactgcctggagtattttccttcacaaatgctgagaactggcaataactttgaaatggcttacaactttgggaaggtgccgttccactcaatgtatgcttacagccagagcccggacagactgatgaatcccctcctggaccagtacctgtggcacttacagtcgaccacctctggagagactctgaatcaaggcaatgcagcaaccacatttggaaaaatcaggagtggagactttgccttttacagaaagaactggctgcctgggccttgtgttaaacagcagagactctcaaaaactgccagtcaaaattacaagattcctgccagcgggggcaacgctctgttaaagtatgacacccactataccttaaacaaccgctggagcaacatagcgcctggacctccaatggcaacagctggaccttcagatggggacttcagcaacgcccagctcatcttccctggaccatcagtcaccggaaacacaacaacctcagcaaacaatctgttgtttacatcagaagaagaaattgctgccaccaacccaagagacacggacatgtttggtcagattgctgacaataatcagaatgctacaactgctcccataaccggcaacgtgactgctatgggagtgcttcctggcatggtgtggcaaaacagagacatttactaccaagggccaatttgggccaagatcccacacgcggacggacattttcatccttcaccgctaattggcggttttggactgaaacatccgcctccccagatatttatcaaaaacacccccgtacctgccaatcctgcgacaaccttcactgcagccagagtggactctttcatcacacaatacagcaccggccaggtcgctgttcagattgaatgggaaatcgaaaaggaacgctccaaacgctggaatcctgaagtgcagtttacttcaaactatgggaaccagtcttctatgttgtgggctcccgatacaactgggaagtatacagagccgcgggttattggctctcgttatttgactaatcatttgtaactgcctagttaatcaataaaccgtgtgattcgtttcagttgaactttggtctctgcgaagggcgaattc

SEQ ID NO: 434 - protein, 733 aa, Artificial Sequence
  source: /note="Description of Artificial Sequence: Synthetic polypeptide"
MAADGYLPDWLEDNLSEGIREWWDLKPGAPKPKANQQKQDDGRGLVLPGYKYLGPFNGLDKGEPVNAADAAALEHDKAYDQQLKAGDNPYLRYNHADAEFQERLQEDTSFGGNLGRAVFQAKKRVLEPLGLVEEGAKTAPGKKRPLESPQEPDSSSGIGKKGKQPAKKRLNFEEDTGAGDGPPEGSDTSAMSSDIEMRAAPGGNAVDAGQGSDGVGNASGDWHCDSTWSEGKVTTTSTRTWVLPTYNNHLYLRLGTTSNSNTYNGFSTPWGYFDFNRFHCHFSPRDWQRLINNNWGLRPKAMRVKIFNIQVKEVTTSNGETTVANNLTSTVQIFADSSYELPYVMDAGQEGSLPPFPNDVFMVPQYGYCGIVTGENQNQTDRNAFYCLEYFPSQMLRTGNNFEMAYNFEKVPFHSMYAHSQSLDRLMNPLLDQYLWHLQSTTSGETLNQGNAATTFGKIRSGDFAFYRKNWLPGPCVKQQRFSKTASQNYKIPASGGNALLKYDTHYTLNNRWSNIAPGPPMATAGPSDGDFSNAQLIFPGPSVTGNTTTSANNLLFTSEEEIAATNPRDTDMFGQIADNNQNATTAPITGNVTAMGVLPGMVWQNRDIYYQGPIWAKIPHADGHFHPSPLIGGFGLKHPPPQIFIKNTPVPANPATTFTAARVDSFITQYSTGQVAVQIEWEIEKERSKRWNPEVQFTSNYGNQSSMLWAPDTTGKYTEPRVIGSRYLTNHL

SEQ ID NO: 435 - DNA, 3105 bp, Artificial Sequence
  source: /note="Description of Artificial Sequence: Synthetic polynucleotide"
gaattcgcccttgctgcgtcaactggaccaatgagaactttcccttcaacgattgcgtcgacaagatggtgatctggtgggaggagggcaagatgaccgccaaggtcgtggagtccgccaaggccattctgggcggaagcaaggtgcgcgtggaccaaaagtgcaagtcatcggcccagatcgaccccacgcccgtgatcgtcacctccaacaccaacatgtgcgccgtgatcgacgggaacagcaccaccttcgagcaccagcagccgctgcaggaccgcatgttcaagttcgagctcacccgccgtctggagcacgactttggcaaggtgaccaagcaggaagtcaaagagttcttccgctgggctcaggatcacgtgactgaggtggcgcatgagttctacgtcagaaagggcggagccaccaaaagacccgcccccagtgacgcggatataagcgagcccaagcgggcctgcccctcagttgcggagccatcgacgtcagacgcggaagcaccggtggactttgcggacaggtaccaaaacaaatgttctcgtcacgcgggcatgcttcagatgctgtttccctgcaagacatgcgagagaatgaatcagaatttcaacgtctgcttcacgcacggggtcagagactgctcagagtgcttccccggcgcgtcagaatctcaacccgtcgtcagaaaaaagacgtatcagaaactgtgcgcgattcatcatctgctggggcgggcacccgagattgcgtgttcggcctgcgatctcgtcaacgtggacttggatgactgtgtttctgagcaataaatgacttaaaccaggtatggctgctgacggttatcttccagattggctcgaggacaacctctctgagggcattcgcgagtggtgggacctgaaacctggagcccccaagctcaaggccaaccagcagaagcaggacgacggccggggtctggtgcttcctggctacaagtacctcggacccttccacggactcgacaagggggagcccgtcaacgcggcggacgcagcggccctcgagcacgacaaggcctacgaccagcagctcaaagcgggtgacaatccgtacctgcggtataaccacgccgacgccgagtttcaggagcgtctgcaagaagatacgtcttttgggggcaacctcgggcgagcagtcttccaggccaagaagagggtactcgaaccactgggcctggttgaagaaggtgctaagacggctcctggaaagaagagaccgttagagtcaccacaagagcccgactcctcctcaggaatcggcaaaaaaggcaaacaaccagccaaaaagagactcaactttgaagaggacactggagccggagacggaccccctgaaggatcagataccagcgccatgtcttcagacattgaaatgcgtgcagcaccgggcggaaatgctgtcgatgcgggacaaggttccgatggagtgggtaatgcctcgggtgattggcattgcgattccacctggtctgagggcaaggtcacaacaacctcgaccagaacctgggtcttgcccacctacaacaaccacttgtacctgcggctcggaacaacatcaaacagcaacacctacaacggattctccaccccctggggatactttgactttaacagattccactgtcacttctcaccacgtgactggcaaagactcatcaacaacaactggggactacgaccaaaagccatgcgcgttaaaatcttcaatatccaagttaaggaggtcacaacgtcgaacggcgagactacggtcgctaataaccttaccagcacggttcagatatttgcggactcgtcgtatgagctcccgtacgtgatggacgctggacaagagggaagtctgcctcctttccccaatgacgtcttcatggtgcctcaatatggctactgtggcattgtgactggcgaaaatcagaaccagacggacagaaatgctttctactgcctggagtattttccttcacaaatgctgagaactggcaataactttgaaatggcttacaactttgagaaggtgccgttccactcaatgtatgctcacagccagagcctggacagactgatgaatcccctcctggaccagtacctgtggcacttacagtcgaccacctctggagagactctgaatcaaggcaatgcagcaaccacatttggaaaaatcaggagtggagactttgccttttacagaaagaactggctgcctgggccttgtgttaaacagcagagattctcaaaaactgccagtcaaaattacaagattcctgccagcgggggcaacgctctgttaaagtatgacacccactataccttaaacaaccgctggagcaacatagcgcctggacctccaatggcaacagctggaccttcagatggggacttcagcaacgcccagctcatcttccctggaccatcagtcaccggaaacacaacaacctcagcaaacaatctgttgtttacatcagaaggagaaattgctgccaccaacccaagagacacggacatgtttggtcagattgctgacaataatcagaatgctacaactgctcccataaccggcaacgtgactgctatgggagtgcttcctggcatggtgtggcaaaacagagacatttactaccaagggccaatttgggccaagatcccacacgcggacggacattttcatccttcaccgctaattggcggttttggactgaaacatccgcctccccagatatttatcaaaaacacccccgtacctgccaatcctgcgacaaccttcactgcagccagagtggactctttcatcacacaatacagcaccggccaggtcgctgttcagattgaatgggaaatcgaaaaggaacgctccaaacgccggaatcctgaagtgcagtttacttcaaactatgggaaccagtcttctatgttgtgggctcccgatacaactgggaagtatacagagccgcgggttattggctctcgttatttgactaatcatttgtaactgcctagttaatcaataaaccgtgtgattcgtttcagttgaactttggtctctgcgaagggcgaattc

SEQ ID NO: 436 - protein, 733 aa, Artificial Sequence
  source: /note="Description of Artificial Sequence: Synthetic polypeptide"
MAADGYLPDWLEDNLSEGIREWWDLKPGAPKPKANQQKQDDGRGLVLPGYEYLGPFNGLDKGEPVNAADAAALEHDKAYDQQLKAGDNPYLRYNHADAEFQERLQEDTSFGGNLGRAVFQAKKRVLEPLGLVEEGAKTAPGKKRPLESPQEPDSSSGIGKKGKQPAKKRLNFEEDTGAGDGPPEGSDTSAMSSDIEMRAAPGGNAVDAGQGSDGVGNASGDWHCDSTWSEGKVTTTSTRTWVLPTYNNHLYLRLGTTSNSNTYNGFSTPWGYFDFNRFHCHFSPRDWQRLINNNWGLRPKAMRVKIFNIQVKEVTTSNGETTVANNLTSTVQIFADSSYELPYVMDAGQEGSLPPFPNDVFMVPQYGYCGIVTGENQNQTDRNAFYCLEYFPSQMLRTGNNFETAYNFEKVPFHSMYAHSQSLDGLMNPLLDQYLWHLQSTTSGETLNQGNAATTFGKIRSGDFAFYRKNWLPGPCVKQQRFSKTASQNYKIPASGGNALLKYDTHYTLNNRWSNIAPGPPMATAGPSDGDFSNAQLIFPGPSVTGNTTTSANNLLFTSEEEIAATNPRDTDMFGQIADNNQNATTAPITGNVTAMGVLPGMVWQNRDIYYQGPIWAKIPHADGHFHPSPLIGGFGLKHPPPQIFIKNTPVPAYPATTFTAARVDSFITQYSTGQVAVQIEWEIEKERSKRWNPEVQFTSNCGNQSSMLWAPDTTGKYTEPRVIGSRYLTNHL

SEQ ID NO: 437 - DNA, 3105 bp, Artificial Sequence
  source: /note="Description of Artificial Sequence: Synthetic polynucleotide"
gaattcgcccttcgcagagaccaaagttcaactgaaacgaatcacacggtttattgattaactaggcagttacaaatgattagtcaaataacgagagccaataacccgcggctctgtatacttcccagttgtatcgggagcccacaacatagaagactggttcccacagtttgaagtaaactgcacttcaggattccagcgtttggagcgttccttttcgatttcccattcaatctgaacagcgacctggccggtgctgtattgtgtgatgaaagagtccactctggctgcagtgaaggttgtcgcaggataggcaggtacgggggtgtttttgataaatatctggggaggcggatgtttcagtccaaaaccgccaattagcggtgaaggatgaaaatgtccgtccgcgtgtgggatcttggcccaaattggcccttggtagtaaatgtctctgttttgccacaccatgccaggaagcactcccatagcagtcacgttgccggttatgggagcagttgtagcattctgattattgtcagcaatctgaccaaacatgtccgtgtctcttgggttggtggcagcaatttcttcttctgatgtaaacaacagattgtttgctgaggttgttgtgtttccggtgactgatggtccagggaagatgagctgggcgttgctgaagtccccatctgaaggtccagctgttgccattggaggtccaggcgctatgttgctccagcggttgtttaaggtatagtgggtgtcatactttaacagagcgttgcccccgctggcaggaatcttgtaattttgactggcagtttttgagaatctctgctgtttaacacaaggcccaggcagccagttctttctgtaaaaggcaaagtctccactcctgatttttccaaatgtggttgctgcattgccttgattcagagtctctccagaggtggtcgactgtaagtgccacaggtactggtccaggaggggattcatcagtccgtccaggctctggctgtgagcatacattgagtggaacggcaccttctcaaagttgtaagccgtttcaaagttattgccagttctcagcatttgtgaaggaaaatactccaggcagtagaaagcatttctgtccgtctggttctgattttcgccagtcacaatgccacagtagccatattgaggcaccatgaagacgtcattggggaaaggaggcagacttccctcttgtccagcgtccatcacgtacgggagctcatacgacgagtccgcaaatatctgaaccgtgctggtaaggttattagcgaccgtagtctcgccgttcgacgttgtgacctccttaacttggatattgaagattttaacgcgcatggcttttggtcgtagtccccagttgttgttgatgagtctttgccagtcacgtggtgagaagtgacagtggaatctgttaaagtcaaagtatccccagggggtggagaatccgttgtaggtgttgctgtttgatgttgttccgagccgcaggtacaagtggttgttgtaggtgggcaagacccaggttctggtcgaggttgttgtgaccttgccctcagaccaggtggaatcgcaatgccaatcacccgaggcattacccactccatcggaaccttgtcccgcatcgacagcatttccgcccggtgctgcacgcatttcaatgtctgaagacatggcgctggtatctgatccttcagggggtccgtctccggctccagtgtcctcttcaaagttgagtctctttttggctggttgtttgccttttttgccgattcctgaggaggagtcgggctcttgtggtgactctaacggtctcttctttccaggagccgtcttagcaccttcttcaaccaggcccagaggttcgagtaccctcttcttggcctggaagactgctcgcccgaggttgcccccaaaagacgtatcttcttgcagacgctcctgaaactcggcgtcggcgtggttataccgcaggtacggattgtcacccgctttgagctgctggtcgtaggccttgtcgtgctcgagggccgctgcgtccgccgcgttgacgggctcccccttgtcgagtccgttgaagggtccgaggtactcgtagccaggaagcaccagaccccggccgtcgtcctgcttctgctggttggccttgggcttgggggctccaggtttcaggtcccaccactcgcgaatgccctcagagaggttgtcctcgagccaatctggaagataaccgtcagcagccatacctggtttaagtcatttattgctcagaaacacagtcatccaagtccacgttgacgagatcgcaggccgaacacgcaatctcgggtgcccgccccagcagatgatgaatcgcgcacagtttctgatacgtcttttttctgacgacgggttgagattctgacgcgccggggaagcactctgagcagtctctgaccccgtgcgtgaagcagacgttgaaattctgattcattctctcgcatgtcttgcagggaaacagcatctgaagcatgcccgcgtgacgagaacatttgttttggtacctgtccgcaaggtccaccggtgcttccgcgtctgacgtcgatggctccgcaactgaggggcaggcccgcttgggctcgcttatatccgcgtcactgggggcgggtcttttggtggctccgccctttctgacgtagaactcatgcgccacctcagtcacgtgatcctgagcccagcggaagaactctttgacttcctgcttggtcaccttgccaaagtcgtgctccagacggcgggtgagctcgaacttgaacatgcggtcctgcagcggctgctggtgctcgaaggtggtgctgttcccgtcgatcacggcgcacatgttggtgttggaggtgacgatcacgggcgtggggtcgatctgggccgatgacttgcacttttggtccacgcgcaccttgcttccgcccagaatggccttggcggactccacgaccttggcggtcatcttgccctcctcccaccagatcaccatcttgtcgacgcaatcgttgaagggaaagttctcattggtccagttgacgcagcaagggcgaattc

SEQ ID NO: 438 - protein, 729 aa, Artificial Sequence
  source: /note="Description of Artificial Sequence: Synthetic polypeptide"
MAADGYLPDWLEDNLSEGIREWWDLKPGAPKPKANQQKQDDGRGLVLPGYKYLGPFNGLDKGEPVNAADAAALEHDKAYDQQLKAGDNPYLRYNHADAEFQERLQEDTSFGGNLGRAVFQAKKRVLEPLGLVEEGAKTAPGKKRPIDSPDSSTGIGKKGQQPAKKKLNFGQTGDSESVPDPQPLGEPPAAPSSVGSGTMAAGGGAPMADNNEGADGVGNASGNWHCDSTWLGDRVITTSTRTWALPTYNNHLYKQISSSSSGATNDNHYFGYSTPWGYFDFNRFHCHFSPRDWQRLINNNWGFRPKKLRFKLFNIQVKEVTTNDGVTTIANNLTSTVQVFSDSEYQLPYVLGSAHQGCLPPFPADVFMIPQYGYLTLNNGSQSVGRSSFYCLEYFPSQMLRTGNNFEFSYSFEDVPFHSSYAHSQSLDRLMNPLIDQYLYYLARTQSTTGSTRELQFHQAGPNTMAEQSKNWLPGPCYRQQGLSKNLDFNNNSNFAWTAATKYHLNGRNSLTNPGIPMATNKDDEDQFFPINGVLVFGKTGAANKTTLENVLMTSEEEIKTTNPVATEEYGVVSSNLQPSTAGPQSQTINSQGALPGMVWQNRDVYLQGPIWAKIPHTDGNFHPSPLMGGFGLKHPPPQILIKNTPVPANPPEVFTPAKFASFITQYSTGQVSVEIEWELQKENSKRWNPEIQYTSNYAKSNNVEFAVNPDGVYTEPRPIGTRYLPRNL

SEQ ID NO: 439 - DNA, 3094 bp, Artificial Sequence
  source: /note="Description of Artificial Sequence: Synthetic polynucleotide"
gaattcgcccttgctgcgtcaactggaccaagagaactttcccttcaacgattgcgtcgacaagatggtgatctggtgggaggagggcaagatgacggccaaggtcgtggagtccgccaaagccattctgggcggaagcaaggtgcgcgtcgaccaaaagtgcaagtcctcggcccagatcgatcccacccccgtgatcgtcacctccaacaccaacatgtgcgccgtgatcgacgggaacagcaccaccttcgagcaccagcagccgttgcaggaccggatgttcaaatttgaactcacccgccgtctggaacacgactttggcaaggtgaccaagcaggaagtcaaagagttcttccgctgggctagtgatcacgtgactgaggtgacgcatgagttctacgtcagaaagggcggagccagcaaaagacccgcccccgatgacgcggatataagcgagcccaagcgggcctgtccctcagtcacggacccatcgacgtcagacgcggaaggagctccggtggactttgccgacaggtaccaaaacaaatgttctcgtcacgcgggcatgcttcagatgctgtttccctgcaaaacgtgcgagagaatgaatcagaatttcaacatttgcttcacgcacggggtcagagactgtttagaatgtttccccggcgtgtcagaatctcaaccggtcgtcagaaaaaagacgtatcggaagctgtgtgcgattcatcatctgctggggcgggcacccgagattgcttgctcggcctgcgacctggtcaacgtggacctggacgactgtgtttctgagcaataaatgacttaaaccgggtatggctgccgatggttatcttccagattggctcgaggacaacctctctgagggcattcgcgagtggtgggacctgaaacctggagccccgaaacccaaagccaaccagcaaaagcaggacgacggccggggtctggtgcttcctggctacaagtacctcggacccttcaacggactcgacaagggggagcccgtcaacgcggcggacgcagcggccctcgagcacgacaaggcctacgaccagcagctcaaagcgggtgacaatccgtacctgcggtataaccacgccgacgccgagtttcaggagcgtctgcaagaagatacgtcatttgggggcaacctcgggcgagcagtcttccaggccaagaagcgggttctcgaacctctcggtctggttgaggaaggcgctaagacggctcctggaaagaagagacccatagactctccagactcctccacgggcatcggcaaaaaaggccagcagcccgctaaaaagaagctcaattttggtcagactggcgactcagagtcagtccccgaccctcaacctcttggagaacctccagcagcgccctctagtgtgggatctggtacaatggctgcaggcggtggcgcaccaatggcagacaataacgaaggtgccgacggagtgggtaatgcctcaggaaattggcattgcgattccacatggctgggcgacagagtcatcaccaccagcaccagaacctgggccctccccacctacaacaaccacctctacaagcaaatctccagcagcagctcaggagccaccaatgacaaccactacttcggctacagcaccccctgggggtattttgactttaacagattccactgccacttctcaccacgtgactggcagcgactcatcaacaacaactggggattccggcccaagaagctgcggttcaagctcttcaacatccaggtcaaggaggtcacaacgaatgacggcgtcacgaccatcgctaataaccttaccagcacggttcaggtcttctcggactcggaataccagctgccgtacgtcctcggctctgcgcaccagggctgcctgcctccgttcccggcggacgtcttcatgattcctcagtacggctacctgactctgaacaacggcagccaatcggtgggccgttcctccttctactgcctggaatatttcccctctcaaatgctgagaacgggcaacaactttgagttcagttacagcttcgaggacgtgcctttccacagcagctacgcgcacagccagagcctagaccggctgatgaaccctctcatcgaccagtacctgtactacctggcccggacccagagcaccacgggttccaccagggaactgcaatttcatcaagctgggcccaatactatggccgagcagtcaaagaactggctgcctggaccctgctataggcaacagggactgtcaaagaacttggactttaacaacaacagcaattttgcctggactgctgccactaaatatcatctgaatggcagaaactctttgaccaatcctggcattcccatggcaaccaacaaggatgatgaggaccagttctttcccatcaacggggtactggtttttggcaagacgggagctgccaacaaaactacgctggaaaacgttctgatgaccagcgaggaggagatcaagaccactaaccctgtggctacagaagaatacggtgtggtctccagcaacctgcagccgtctacagccgggcctcaatcacagactatcaacagccagggagcactgcctggcatggtctggcagaaccgggacgtgtatctgcagggtcccatctgggccaaaattcctcacacggatggcaactttcacccgtctcctctgatgggcggttttggactcaaacacccgcctccacagatcctgatcaaaaacacacctgtacctgctaatcctccggaggtgtttactcctgccaagtttgcctccttcatcacgcagtacagcaccggacaagtcagcgtggaaatcgagtgggagctgcagaaagaaaacagcaagcgctggaacccagaaattcagtatacttccaattatgccaagtctaataatgttgaatttgctgtgaaccctgatggtgtttatactgagcctcgccccattggcactcgttacctcccccgtaatctgtaattgcttgttaatcaataaaccggttgattcgtttcagttgaactttggtctctgcgaagggcgaattc

SEQ ID NO: 440 - protein, 1458 aa, Artificial Sequence
  source: /note="Description of Artificial Sequence: Synthetic polypeptide"
MAADGYLPDWLEDNLSEGIREWWDLKPGAPKPKANQQKQDDGRGLVLPGYKYLGPFNGLDKGEPVNAADAAALEHDKAYDQQLKAGDNPYLRYNHADAEFQERLQEDTSFGGNLGRAVFQAKKRVLEPLGLVEEGAKTAPGKKRPIDSPDSSTGIGKKGQQPAKKKLNFGQTGDSESVPDPQPLGEPPAAPSSVGSGTMAAGGGAPTADNNEGADGVGNASGNWHCDSTWLGDRVITTSTRTWALPTYNNHLYKQISSSSSGATNDNHYFGYSTPWGYFDFNRFHCHFSPRDWQRLINNNWGFRPKKLRFKLFNIQVKEVTTNDGVTTIANNLTSTVQVFSDSEYQLPYVLGSAHQGCLPPFPADVFMIPQYGYLTLNNGSQSVGRSSFYCLEYFPSQMLRTGNNFEFSYSFEDVPFHSSYAHSQSLDRLMNPLIDQYLYYLARTQSTTGSTRELQFHQAGPNTMAEQSKNWLPGPCYRQQRLSKNLDFNNNSNFAWTAATKYHLNGRNSLTNPGIPMATNKDDEDQFFPINGVLVFGKTGAANKTTLENVLMTSEEEIKTTNPVATEEYGVVSSNLQSSTAGPQSQTINSQGALPGMVWQNRDVYLQGPIWAKIPHTDGNFHPSPLMGGFGLEHPPPQILIKNTPVPANPPEVFTPAKFASFITQYSTGQVSVEIEWELQKENSKRWNPEIQYTSNYAKSNNVEFAVNPDGVYTEPRPIGTRYLTRNLMAADGYLPDWLEDNLSEGIREWWDLKPGAPKPKANQQKQDDGRGLVLPGYKYLGPFNGLDKGEPVNAADAAALEHDKAYDQQLKAGDNPYLRYNHADAEFQERLQEDTSFGGNLGRAVFQAKKRVLEPLGLVEEGAKTAPGKKRPIGSPDSSTGIGKKGQQPAKKKLNFGQTGDSESVPDPQPLGEPPAAPSSVGSGTMAAGGGAPMADNNEGADGVGNASGNWHCDSTWLGDRVITTSTRTWALPTYNNHLYKQISSSSSGATNDNHYFGYSTPWGYFDFNRFHCHFSPRDWQRLINNNWGFRPKKLRFKLLNIQVKEVTTNDGVTTIANNLTSTVQVFSDSEYQLPYVLGSAHQGCLPPFPADVFMIPQYGYLTLDNGSQSVGRSSFYCLEYFPSQMLRTGNNFEFSYSFEDVPFHSSYAHSQSLDRLMNPLIDQYLYYLARTQSTTGSTRELQFHQAGPNTMAEQSKNWLPGPCYRQQRLSKNLDFNNNSNFAWTAATKYHLNGRNSLTNPGIPMATNKDDEDQFFPINGVLVFGKTGAANKTTLENVLMTSEEEIKTTNPVATEEYGVVSSNLQSSTAGPQSQTINSQGALPGMVWQNRDVYLQGPIWAKIPHTDGNFHPSPLMGGFGLKHPPPQILIKNTPVPANPPEVFTPAKFASFITQYSTGQVSVEIEWELQKENSKRWNPEIQYTSNYAKSNNVEFAVNPDGVYTEPRPIGTRYLTRNL

SEQ ID NO: 441 - DNA, 3095 bp, Artificial Sequence
  source: /note="Description of Artificial Sequence: Synthetic polynucleotide"
gaattcgcccttcgcagagaccaaagttcaactgaaacgaatcaaccggtttattgattaacaagcaattacagattacgggtgaggtaacgagtgccaatggggcgaggctcagtataaacaccatcagggttcacagcaaattcaacattattagacttggcataattggaagtatactgaatttctgggttccagcgcttgctgttttctttctgcagctcccactcgatttccacgctgacttgtccggtgctgtactgcgtgatgaaggaggcaaacttggcaggagtaaacacctccggaggattagcaggtacaggtgtgtttttgatcaggatctgtggaggcgggtgtttgagtccaaaaccgcccatcagaggagacgggtgaaagttgccatccgtgtgaggaattttggcccagatgggaccctgcagatacacgtcccggttctgccagaccatgccaggcagtgctccctggctgttgatagtctgtgattgaggcccggctgtagacgactgcaggttgctggagaccacaccgtattcttctgtagccacagggttagtggtcttgatctcctcctcgctggtcatcagaacgttttccagcgtagttttgttggcagctcccgtcttgccaaaaaccagtaccccgttgatgggaaagaactggtcctcatcatccttgttggttgccatgggaatgccaggattggtcaaagagtttctgccattcagatgatatttagtggcagcagtccaggcaaaattgctgttgttgttaaagtccaagttctttgacagtctctgttgcctatagcagggtccaggcagccagttctttgactgctcggccatagtattgggcccagcttgatgaaattgcagttccctggtggaacccgtggtgctctgggtccgggccaggtagtacaggtactggtcgatgagagggttcatcagccggtctaggctctggctgtgcgcgtagctgctgtggaaaggcacgtcctcgaagctgtaactgaactcaaagttgttgcccgttctcagcatttgagaggggaaatattccaggcagtagaaggaggaacggcccaccgattggctgccgttgtccagagtcaggtagccgtactgaggaatcatgaagacgtccgccgggaacggaggcaggcagccctggtgcgcagagccgaggacgtacggcagctggtattccgagtccgagaagacctgaaccgtgctggtaaggttattagcgatggtcgtgacgccgtcattcgttgtgacctccttgacctggatgttgaggagcttgaaccgcagcttcttgggccggaatccccagttgttgttgatgagtcgctgccagtcacgtggtgagaagtggcagtggaatctgttaaagtcaaaatacccccagggggtgctgtagccgaagtagtggttgtcattggtggctcctgagctgctgctggagatttgcttgtagaggtggttgttgtaggtggggagggcccaggttctggtgctggtggtgatgactctgtcgcccagccatgtggaatcgcaatgccaatttcctgaggcattacccactccgtcggcaccttcgttattgtctgccattggtgcgccaccgcctgcagccattgtaccagatcccacactagagggcgctgctggaggttctccaagaggttgagggtcggggactgactctgagtcgccagtctgaccaaaattgagcttctttttagcgggctgctggccttttttgccgatgcccgtggaggagtctggagagcctatgggtctcttctttccaggagccgtcttagcgccttcctcaaccagaccgagaggttcgagaacccgcttcttggcctggaagactgctcgcccgaggttgcccccaaatgacgtatcttcttgcagacgctcctgaaactcggcgtcggcgtggttataccgcaggtacggattgtcacccgctttgagctgctggtcgtaggccttgtcgtgctcgagggccgctgcgtccgccgcgttgacgggctcccccttgtcgagtccgttgaagggtccgaggtacttgtagccaggaagcaccagaccccggccgtcgtcctgcttttgctggttggctttgggtttcggggctccaggtttcaggtcccaccactcgcgaatgccctcagagaggttgtcctcgagccaatctggaagataaccatcggcagccatacctggtttaagtcatttattgctcagaaacacagtcgtccaggtccacgttgaccaggtcgcaggccgagcaagcaatctcgggtgcccgccccagcagatgatgaatcgcacacagcttccgatacgtcttttttctgacgaccggttgagattctgacacgccggggaaacattctaaacagtctctgaccccgtgcgtgaagcaaatgttgaaattctgattcattctctcgcacgttttgcagggaaacagcacctgaagcatgcccgcgtgacgagaacatttgttttggtacctgtcggcaaagtccaccggagctccttccgcgtctgacgtcgatgggtccgtgactgagggacgggcccgcttgggctcgcttatatccgcgtcatcgggggcgggtcttttgctggctccgccctttctgacgtagaactcatgcgtcacctcagtcacgtgatcactagcccagcggaagaactctttgacttcctgctttgtcaccttgccaaagtcgtgttccagacggcgggtgagttcaaatttgaacatccggtcctgcaacggttgctggtgctcgaaggtggtgctgttcccgtcgatcacggcgcacatgttggtgttggaggtgacgatcacgggggtgggatcgatctgggcggacgacttgcacttttggtccacgcgcaccttgctgccgccgagaatggccttggcggactccacgaccttggccgtcatcttgccctcctcccaccagatcaccatcttgtcgacgcaatcgttgaagggaaagttctcattggtccagttgacgcagcaagggcgaattc

SEQ ID NO: 442 - DNA, 3095 bp, Artificial Sequence
  source: /note="Description of Artificial Sequence: Synthetic polynucleotide"
gaattcgcccttcgcagagaccaaagttcaactgaaacgaatcaaccggtttattgattaacaagcaattacagattacgggtgaggtaacgagtgccaatggggcgaggctcagtataaacaccatcagggttcacagcaaattcaacattattagacttggcataattggaagtatactgaatttctgggttccagcgcttgctgttttctttctgcagctcccactcgatttccacgctgacttgtccggtgctgtactgcgtgatgaaggaggcaaacttggcaggagtaaacacctccggaggattagcaggtacaggtgtgtttttgatcaggatctgtggaggcgggtgttcgagtccaaaaccgcccatcagaggagacgggtgaaagttgccatccgtgtgaggaattttggcccagatgggaccctgcagatacacgtcccggttctgccagaccatgccaggcagtgctccctggctgttgatagtctgtgattgaggcccggctgtagacgactgcaggttgctggagaccacaccgtattcttctgtagccacagggttagtggtcttgatctcctcctcgctggtcatcagaacgttttccagcgtagttttgttggcagctcccgtcttgccaaaaaccagtaccccgttgatgggaaagaactggtcctcatcatccttgttggttgccatgggaatgccaggattggtcaaagagtttctgccattcagatgatatttagtggcagcagtccaggcaaaattgctgttgttgttaaagtccaagttctttgacagtctctgttgcctatagcagggtccaggcagccagttctttgactgctcggccatagtattgggcccagcttgatgaaattgcagttccctggtggaacccgtggtgctctgggtccgggccaggtagtacaggtactggtcgatgagagggttcatcagccggtctaggctctggctgtgcgcgtagctgctgtggaaaggcacgtcctcgaagctgtaactgaactcaaagttgttgcccgttctcagcatttgagaggggaaatattccaggcagtagaaggaggaacggcccaccgattggctgccgttgttcagagtcaggtagccgtactgaggaatcatgaagacgtccgccgggaacggaggcaggcagccctggtgcgcagagccgaggacgtacggcagctggtattccgagtccgagaagacctgaaccgtgctggtaaggttattagcgatggtcgtgacgccgtcattcgttgtgacctccttgacctggatgttgaagagcttgaaccgcagcttcttgggccggaatccccagttgttgttgatgagtcgctgccagtcacgtggtgagaagtggcagtggaatctgttaaagtcaaaatacccccagggggtgctgtagccgaagtagtggttgtcattggtggctcctgagctgctgctggagatttgcttgtagaggtggttgttgtaggtggggagggcccaggttctggtgctggtggtgatgactctgtcgcccagccatgtggaatcgcaatgccaatttcctgaggcattacccactccgtcggcaccttcgttattgtctgccgttggtgcgccaccgcctgcagccattgtaccagatcccacactagagggcgctgctggaggttctccaagaggttgagggtcggggactgactctgagtcgccagtctgaccaaaattgagcttctttttagcgggctgctggccttttttgccgatgcccgtggaggagtctggagagtctatgggtctcttctttccaggagccgtcttagcgccttcctcaaccagaccgagaggttcgagaacccgcttcttggcctggaagactgctcgcccgaggttgcccccaaatgacgtatcttcttgcaggcgctcctgaaactcggcgtcggcgtggttataccgcaggtacggattgtcacccgctttgagctgctggtcgtaggccttgtcgtgctcgagggccgctgcgtccgccgcgttgacgggctcccccttgtcgagtccgttgaagggtccgaggtacttgtagccaggaagcaccagaccccggccgtcgtcctgcttttgctggttggctttgggtttcggggctccaggtttcaggtcccaccactcgcgaatgccctcagagaggttgtcctcgagccaatctggaagataaccatcggcagccatacctggtttaagccatttattgctcagaaacacagtcgtccaggtccacgttgaccaggtcgcaggccgagcaggcaatctcgggtgcccgccccagcagatgatgaatcgcacacagcttccgatacgtcttttttctgacgaccggttgagattctgacacgccggggaaacattctaaacagtctctgaccccgtgcgtgaagcaaatgttgaaattctgattcattctctcgcacgttttgcagggaaacagcatctgaagcatgcccgcgtggcgagaacatttgttttggtacctgtcggcaaagtccaccggagctccttccgcgtctgacgtcgatgggtccgtgactgagggacaggcccgcttgggctcgcttatatccgcgtcatcgggggcgggtcttttgctggctccgccctttctgacgtagaactcatgcgtcacctcagtcacgtgatcactagcccagcggaagaactctttgacttcctgctttgtcaccttgccaaagtcgtgttccagacggcgggtgagttcaaatttgaacatccggtcctgcaacggctgctggtgctcgaaggtggtgctgttcccgtcgatcacggcgcgcatgttggtgttggaggtgacgatcacgggggtgggatcgatctgggcggacgacttgcacttttggtccacgcgcaccttgctgccgccgagaatggccttggcggactccacgaccttggccgtcatcttgccctcctcccaccagatcaccatcttgtcgacgcaatcgttgaagggaaagttctcattggtccagttgacgcagcaagggcgaattc

SEQ ID NO: 443 - protein, 729 aa, Artificial Sequence; identical to SEQ ID NO: 171
  source: /note="Description of Artificial Sequence: Synthetic polypeptide"

SEQ ID NO: 444 - protein, 729 aa, Artificial Sequence
  source: /note="Description of Artificial Sequence: Synthetic polypeptide"
MAADGYLPDWLEDNLSEGIREWWDLKPGAPKPKANQQKQDDGRGLVLPGYKYLGPFNGLDKGEPVNAADAAALEHDKAYDQQLKAGDNPYLRYNHADAEFQERLQEDTSFGGNLGRAVFQAKKRVLEPLGLVEEGAKTAPGKKRPIDSPDSSTGIGKKGQQPAKKKLNFGQTGDSESVPDPQPLGEPPAAPSSVGSGTMAAGGGAPTADNNEGADGVGNASGNWHCDSTWLGDRVITTSTRTWALPTYNNHLYKQISSSSSGATNDNHYFGYSTPWGYFDFNRFHCHFSPRDWQRLINNNWGFRPKKLRFKLFNIQVKEVTTNDGVTTIANNLTSTVQVFSDSEYQLPYVLGSAHQGCLPPFPADVFMIPQYGYLTLNNGSQSVGRSSFYCLEYFPSQMLRTGNNFEFSYSFEDVPFHSSYAHSQSLDRLMNPLIDQYLYYLARTQSTTGSTRELQFHQAGPNTMAEQSKNWLPGPCYRQQRLSKNLDFNNNSNFAWTAATKYHLNGRNSLTNPGIPMATNKDDEDQFFPINGVLVFGKTGAANKTTLENVLMTSEEEIKTTNPVATEEYGVVSSNLQSSTAGPQSQTINSQGALPGMVWQNRDVYLQGPIWAKIPHTDGNFHPSPLMGGFGLKHPPPQILIKNTPVPANPPEVFTPAKFASFITQYSTGQVSVEIEWELQKENSKRWNPEIQYTSNYAKSNNVEFAVNPDGVYTEPRPIGTRYLTRNL

SEQ ID NO: 445 - protein, 729 aa, Artificial Sequence
  source: /note="Description of Artificial Sequence: Synthetic polypeptide"
MAADGYLPDWLEDNLSEGIREWWDLKPGAPKPKANQQKQDDGRGLVLPGYKYLGPFNGLDKGEPVNAADAAALEHDKAYDQQLKAGDNPYLRYNHADAEFQERLQEDTSFGGNLGRAVFQAKKRVLEPLGLVEEGAKTAPGKKRPIDSPDSSTGIGKKGQQPAKKKLNFGQTGDSESVPDPQPLGEPPAAPSSVGSGTMAAGGGAPMADNNEGADGVGNASGNWHCDSTWLGDRVITTSTRTWALPTYNNHLYKQISSSSSGATNDNHYFGYSTPWGYFDFNRFHCHFSPRDWQRLINNNWGFRPKKLRFKLFNIQVKEVTTNDGVTTIANNLTSTVQVFSDSEYQLPYVLGSAHQGCLPPFPADVFMIPQYGYLTLNNGSQSVGRSSFYCLEYFPSQMLRTGNNFEFSYSFEDVPFHSSYAHSQSLDRLMNPLIDQYLYYLARTQSTTGSTRELQFHQAGPNTMAEQSKNWLPGPCYRQQRLSKNLDFNNNSNFAWTAATKYHLNGRNSLTNPGIPMATNKDDEDQFFPINGVLVFGKTGAANKTTLENVLMTSEEEIKTTNPVATEEYGVVSSNLQSSTAGPQSQTINSQGALPGMVWQNRDVYLQGPIWAKIPHTDGNFHPSPLMGGFGLKHPPPQILIKNTPVPANPPEVFTPAKFASFITQYSTGQVSVEIEWELQKENSKRWNPEIQYTSNYAKSNNVEFAVNPDGVYTEPRPIGTRYLTRNL

SEQ ID NO: 446 - DNA, 2217 bp, Artificial Sequence
  source: /note="Description of Artificial Sequence: Synthetic polynucleotide"
atggctgctgacggttatcttccagattggctcgaggacaacctctctgagggcattcgcgagtggtgggacctgaaacctggagcccccaagcccaaggccaaccagcagaagcaggacgacggccggggtctggtgcttcctggctacaagtacctcggacccttcaacggactcgacaagggggagcccgtcaacgcggcggacgcagcggccctcgagcacgacaaggcctacgaccagcagctcaaagcgggtgacaatccgtacctgcggtataaccacgccgacgccgagtttcaggagcgtctacaagaagatacgtcttttgggggcaacctcgggcgagcagtcttccaggccaagaagcgggttctcgaacctctcggtctggttgaggaagctgctaagacggctcctggaaagaagagaccggtagaaccgtcacctcagcgttcccccgactcctccacgggcatcggcaagaaaggccagcggcccgctaaaaagagactgaactttggtcagactggcgactcagagtcagtccccgaccctcaaccaatcggagaaccaccagcaggcccctctggtctgggatctggtacaatggctgcaggcggtggcgctccaatggcagacaataacgaaggcgccgacggagtgggtagttcctcaggaaattggcattgcgattccacatggctgggcgacagagtcatcaccaccagcacccgaacctgggccctgcccacctacaacaaccacctctacaagcaaatatccaatgggacatcgggaggaagcaccaacgacaacacctacttcggctacagcaccccctgggggtattttgacttcaacagattccactgccacttctcaccacgtgactggcagcgactcatcaacaacaactggggattccggccaaaaagactcagcttcaagcccttcaacatccaggtcaaggaggtcacgcagaatgaaggcaccaagaccatcgccaataaccttaccagcacgattcaggtatttacggactcggaataccagctgccgtacgtcctcggctccgcgcaccagggctgcctgcctccgttcccggcggacgtcttcatgattccccagtacggctaccttacactgaacaatggaagtcaagccgtaggccgttcctccttctactgcctggaatattttccatctcaaatgctgcgaactggaaacaattttgaattcagctacaccttcgaggacgtgcctttccacagcagctacgcacacagccagagcttggaccgactgatgaatcctctcatcgaccagtacctgcactacttatccagaactcagtccacaggaggaactcaaggtacccagcaattgttattttctcaagctgggcctgcaaacatgtcggctcaggctaagaactggctacctggaccttgctaccggcagcagcgagtctctacgacactgtcgcaaaacaacaacagcaactttgcttggactggtgccaccaaatatcacctgaacggaagagactctttggtaaatcccggtgtcgccatggcaacccacaaggacgacgaggaacgcttcttcccgtcgagtggagtcctgatgtttggaaaacagggtgctggaagagacaatgtggactacagcagcgttatgctaaccagcgaagaagaaattaaaaccactaaccctgtagccacagaacaatacggtgtggtggctgacaacttgcagcaaaccaatacagggcctattgtgggaaatgtcaacagccaaggagccttacctggcatggtctggcagaaccgagacgtgtacctgcagggtcccatctgggccaagattcctcacacggacggcaacttccacccttcaccgctaatgggaggatttggactgaagcacccacctcctcagatcctgatcaagaacacgccggtacctgcggatcctccaacaacgttcagccaggcgaaattggcttccttcattacgcagtacagcaccggacaggtcagcgtggaaatcgagtgggagctgcagaaggagaacagcaaacgctggaacccagagattcagtacacttcaaactactacaaatctacaaatgtggactttgctgtcaatacagagggaacttattctgagcctcgccccattggtactcgctacctcacccgtaatctgtaa

SEQ ID NO: 447 - protein, 738 aa, Artificial Sequence
  source: /note="Description of Artificial Sequence: Synthetic polypeptide"
MAADGYLPDWLEDNLSEGIREWWDLKPGAPKPKANQQKQDDGRGLVLPGYKYLGPFNGLDKGEPVNAADAAALEHDKAYDQQLKAGDNPYLRYNHADAEFQERLQEDTSFGGNLGRAVFQAKKRVLEPLGLVEEAAKTAPGKKRPVEPSPQRSPDSSTGIGKKGQRPAKKRLNFGQTGDSESVPDPQPIGEPPAGPSGLGSGTMAAGGGAPMADNNEGADGVGSSSGNWHCDSTWLGDRVITTSTRTWALPTYNNHLYKQISNGTSGGSTNDNTYFGYSTPWGYFDFNRFHCHFSPRDWQRLINNNWGFRPKRLSFKPFNIQVKEVTQNEGTKTIANNLTSTIQVFTDSEYQLPYVLGSAHQGCLPPFPADVFMIPQYGYLTLNNGSQAVGRSSFYCLEYFPSQMLRTGNNFEFSYTFEDVPFHSSYAHSQSLDRLMNPLIDQYLHYLSRTQSTGGTQGTQQLLFSQAGPANMSAQAKNWLPGPCYRQQRVSTTLSQNNNSNFAWTGATKYHLNGRDSLVNPGVAMATHKDDEERFFPSSGVLMFGKQGAGRDNVDYSSVMLTSEEEIKTTNPVATEQYGVVADNLQQTNTGPIVGNVNSQGALPGMVWQNRDVYLQGPIWAKIPHTDGNFHPSPLMGGFGLKHPPPQILIKNTPVPADPPTTFSQAKLASFITQYSTGQVSVEIEWELQKENSKRWNPEIQYTSNYYKSTNVDFAVNTEGTYSEPRPIGTRYLTRNL

SEQ ID NO: 448 - DNA, 2217 bp, Artificial Sequence
  source: /note="Description of Artificial Sequence: Synthetic polynucleotide"
atggctgctgacggttatcttccagattggctcgaggacaacctctctgagggcattcgcgagtggtgggacctgaaacctggagcccccaagcccaaggccaaccagcagaagcaggacgacggccggggtctggtgcttcctggctacaagtacctcggacccttcaacggactcgacaagggggagcccgtcaacgcggcggacgcagcggccctcgagcacgacaaggcctacgaccagcagctcaaagcgggtgacaatccgtacctgcggtataaccacgccgacgccgagtttcaggagcgtctgcaagaagatacgtcttttgggggcaacctcgggcgagcagtcttccaggccaagaagcgggttctcgaacctctcggtctggttgaggaagctgctaagacggctcctggaaagaagagaccggtagaaccgtcacctcagcgttcccccgactcctccacgggcatcggcaagaaaggccagcagcccgctaaaaagagactgaactttggtcagactggcgactcagagtcagtccccgaccctcaaccaatcggagaaccaccagcaggcccctctggtctgggatctggtacaatggctgcaggcggtggcgctccaatggcagacaataacgaaggcgccgacggagtgggtagttcctcaggaaattggcattgcgattccacatggctgggcgacagagtcatcaccaccagcacccgaacctgggccctgcccacctacaacaaccacctctacaagcaaatatccaatgggacatcgggaggaagcaccaacgacaacacctacttcggctacagcaccccctgggggtattttgacttcaacagattccactgccacttctcaccacgtgactggcagcgactcatcaacaacaactggggattccggccaaaaagactcagcttcaagctcttcaacatccaggtcaaggaggtcacgcagaatgaaggcaccaagaccatcgccaataaccttaccagcacgattcaggtatttacggactcggaataccagctgccgtacgtcctcggctccgcgcaccagggctgcctgcctccgttcccggcggacgtcttcatgattccccagtacggctaccttacactgaacaatggaagtcaagccgtaggccgttcctccttctactgcctggaatattttccatctcaaatgctgcgaactggaaacaattttgaattcagctacaccttcgaggacgtgcctttccacagcagctacgcacacagccagagcttggaccgactgatgaatcctctcatcgaccagtacctgtactacttatccagaactcagtccacaggaggaactcaaggtacccagcaattgttattttctcaagctgggcctgcaaacatgtcggctcaggctaagaactggctacctggaccttgctaccggcagcagcgagtctctacgacactgtcgcaaaacaacaacagcaactttgcttggactggtgccaccaaatatcacctgaacggaagagactctttggtaaatcccggtgtcgccatggcaacccacaaggacgacgaggaacgcttcttcccgtcgagtggagtcctgatgtttggaaaacagggtgctggaagagacaatgtggactacagcagcgttatgctaaccagcgaagaagaaattaaaaccactaaccctgtagccacagaacaatacggtgtggtggctgataacttgcagcaaaccaatacggggcctattgtgggaaatgtcaacagccaaggagccttacctggcatggtctggcagaaccgagacgtgtacctgcagggtcccatctgggccaagattcctcacacggacggcaacttccacccttcaccgctaatgggaggatttggactgaagcacccacctcctcagatcctgatcaagaacacgccggtacctgcggatcctccaacaacgttcagccaggcgaaattggcttccttcattacgcagtacagcaccggacaggtcagcgtggaaatcgagtgggagctgcagaaggagaacagcaaacgctggaacccagagattcagtacacttcaaactactacaaatctacaaatgtggactttgctgtcaatacagagggaacttattctgagcctcgccccattggtactcgttacctcacccgtaatctgtaa

SEQ ID NO: 449 - protein, 738 aa, Artificial Sequence; identical to SEQ ID NO: 101
  source: /note="Description of Artificial Sequence: Synthetic polypeptide"

SEQ ID NO: 450 - protein, 738 aa, Artificial Sequence
  source: /note="Description of Artificial Sequence: Synthetic polypeptide"
MAADGYLPDWLEDNLSEGIREWWDLKPGAPKPKANQQKQDDGRGLVLPGYKYLGPFNGLDKGEPVNAADAAALEHDKAYDQQLKAGDNPYLRYNHADAEFQERLQEDTSFGGNLGRAVFQAKKRVLEPLGLVEEAAKTAPGKKRPVEPSPQRSPDSSTGIGKKGQQPAKKRLNFGQTGDSESVPDPQPIGEPPAGPSGLGSGTMAAGGGAPMADNNEGADGVGSSSGNWHCDSTWLGDRVITTSTRTWALPTYNNHLYKQISNGTSGGSTNDNTYFGYSTPWGYFDFNRFHCHFSPRDWQRLINNNWGFRPKRLSFKLFNIQVKEVTQDEGTKTIANNLTSTIQVFTDSEYQLPYVLGSAHQGCLPPFPADVFMIPQYGYLTLNNGSQAVGRSSFYCLEYFPSQMLRTGNNFEFSYTFEDVPFHSSYAHSQSLDRLMNPLIDQYLYYLSRTQSTGGTQGTQQLLFSQAGPANMSARAKNWLPGPCYRQQRVSTTLSQNNNSNFAWTGATKYHLNGRDSLVNPGVAMATHKDDEERFFPSSGVLMFGKQGAGRDNVDYSSVMLTSEEEIKTTNPVATEQYGVVADNLQQANTGPIVGNVNSQGALPGMVWQNRDVYLQGPIWAKIPHTDGNFHPSPLMGGFGLKHPPPQILIKNTPVPADPPTTFSQAKLASFITQYSTGQVSVEIEWELQKENSKRWNPEIQYTSNYYKSTNVDFAVNSEGTYSEPRPIGTRYLTRNL

SEQ ID NO: 451 - DNA, 2217 bp, Artificial Sequence
  source: /note="Description of Artificial Sequence: Synthetic polynucleotide"
atggctgctgacggttatcttccagattggctcgaggacaacctctctgagggcattcgcgagtggtgggacctgaaacctggagcccccaagcccaaggccaaccagcagaagcaggacgacggccggggtctggtgcttcctggctacaagtacctcggacccttcaacggactcgacaagggggagcccgtcaacgcggcggacgcagcggccctcgagcacgacaaggcctacgaccagcagctcaaagcgggtgacaatccgtacctgcggtataaccacgccgacgccgagtttcaggagcgtctgcaagaagatacgtcttttgggggcaacctcgggcgagcagtcttccaggccaagaagcgggttctcgaacctctcggtctggttgaggaagctgctaagacggctcctggaaagaagagaccggtagaaccgtcacctcagcgttcccccgactcctccacgggcatcggcaagaaaggccagcagcccgctaaaaagagactgaactttggtcagactggcgactcagagtcagtccccgaccctcaaccaatcggagaaccaccagcaggcccctctggtctgggatctggtacaatggctgcaggcggtggcgctccaatggcagacaataacgaaggcgccgacggagtgggtagttcctcaggaaattggcattgcgattccacatggctgggcgacagagtcatcaccaccagcacccgaacctgggccctgcccacctacaacaaccacctctacaagcaaatatccaatgggacatcgggaggaagcaccaacgacaacacctacttcggctacagcaccccctgggggtattttgacttcaacagattccactgccacttctcaccacgtgactggcagcgactcatcaacaacaactggggattccggccaaaaagactcagcttcaagctcttcaacatccaggtcaaggaggtcacgcaggatgaaggcaccaagaccatcgccaataaccttaccagcacgattcaggtatttacggactcggaataccagctgccgtacgtcctcggctccgcgcaccagggctgcctgcctccgttcccggcggacgtcttcatgattccccagtacggctaccttacactgaacaatggaagtcaagccgtaggccgttcctccttctactgcctggaatattttccatctcaaatgctgcgaactggaaacaattttgaattcagctacaccttcgaggacgtgcctttccacagcagctacgcacacagccagagcttggaccgactgatgaatcctctcatcgaccagtacctgtactacttatccagaactcagtccacaggaggaactcaaggtacccagcaattgttattttctcaagctgggcctgcaaacatgtcggctcgggctaagaactggctacctggaccttgctaccggcagcagcgagtctctacgacactgtcgcaaaacaacaacagcaactttgcttggactggtgccaccaaatatcacctgaacggaagagactctttggtaaatcccggtgttgctatggcaacgcataaggacgacgaggaacgtttctttccatcgagcggagtcctgatgtttggaaaacagggtgctggaagagacaatgtggactatagcagcgttatgctaaccagcgaggaagaaattaaaaccactaaccctgtagccacagaacaatacggtgtggtggctgacaacttgcagcaagccaatacagggcctattgtgggaaatgtcaacagccaaggagccttacctggcatggtctggcagaaccgagacgtgtacctgcagggtcccatctgggccaaaattcctcacacggacggcaattttcacccgtctcctctgatgggcggctttggactgaagcacccacctccccagatcctgatcaagaatacgccggtacctgcggatcctccaacgacgttcagccaggcaaaattggcttccttcatcacgcagtacagcaccggccaggtcagcgtggagatcgagtgggagctgcagaaggagaacagcaagcgatggaacccagaaattcagtacacttccaactactacaaatctacaaatgtggactttgctgtcaattctgagggtacatattcagagcctcgccccattggtactcgttatctgacacgtaatctgtaa

SEQ ID NO: 452 - DNA, 2211 bp, Artificial Sequence
  source: /note="Description of Artificial Sequence: Synthetic polynucleotide"
atggctgccgatggttatcttccagattggctcgaggacaacctctctgagggcattcgcgagtggtgggacttgaaacctggagccccgaaacccaaagccaaccagcaaaagcaggacgacggccggggcctggtgcttcctggctacaagtacctcggacccttcaacggactcgacaagggggagcccgtcaacgcggcggacgcagcggccctcgagcacgacaaggcctacgaccagcagctcgaagcgggtgacaatccgtacctgcggtataaccacgccgacgccgagtttcaggagcgtctgcaagaagatacgtcttttgggggcaacctcgggcgagcagtcttccaggccaagaagcgggttctcgaacctctcggtctggttgaggaaggcgctaagacggctcctggaaagaagagaccagtagagcagtcaccccaagaaccagactcctcctcgggcatcggcaagaaaggccaacagcccgccagaaaaagactcaattttggccagactggcgactcagagtcagttccagaccctcaacctctcggagaacctccagcagcgccctctggtgtgggacctaatacaatggctgcaggcggtggcgcaccaatggcagacaataacgaaggcgccgacggagtgggtagttcctcgggaaattggcattgcgattccacatggctgggcgacagagtcatcaccaccagcacccgaacctgggccctgcccacctacaacaaccacctctacaagcaaatctccaacgggacatcgggaggagccaccaacgacaacacctacttcggctacagcaccccctgggggtattttgactttaacagattccactgccacttttcaccacgtgactggcagcgactcatcaacaacaactggggattccggcccaagagactcagcttcaagctcttcaacatccaggtcaaggaggtcacgcagaatgaaggcaccaagaccatcgccaataacctcaccagcaccatccaggtgtttacggactcggagtaccagctgccgtacgttctcggctctgcccaccagggctgcctgcctccgttcccggcggacgtgttcatgattccccagtacggctacctaacactcaacaacggtagtcaggccgtgggacgctcctccttctactgcctggaatactttccttcgcagatgctgagaaccggcaacaacttccagtttacttacaccttcgaggacgtgcctttccacagcagctacgcccacagccagagcttggaccggctgatgaatcctctgattgaccagtacctgtactacttgtctcggactcaaacaacaggaggcacggcaaatacgcagactctgggcttcagccaaggtgggcctaatacaatggccaatcaggcaaagaactggctgccaggaccctgttaccgccaacaacgcgtctcaacgacaaccgggcaaaacaacaatagcaactttgcctggactgctgggaccaaataccatctgaatggaagaaattcattggctaatcctggcatcgctatggcaacacacaaagacgacgaggagcgttttttcccagtaacgggatcctgtttttggcaacaaaatgctgccagagacaatgcggattacagcgatgtcatgctcaccagcgaggaagaaatcaaaaccactaaccctgtggctacagaggaatacggtatcgtggcagataacttgcagcagcaaaacacggctcctcaaattggaactgtcaacagccagggggccttacccggtatggtctggcagaaccgggacgtgtacctgcagggtcccatctgggccaagattcctcacacggacggcaacttccacccgtctccgctgatgggcggctttggcctgaaacatcctccgcctcagatcctgatcaagaacacgcctgtacctgcggatcctccgaccaccttcaaccagtcaaagctgaactctttcatcacgcaatacagcaccggacaggtcagcgtggaaattgaatgggagctacagaaggaaaacagcaagcgctggaaccccgagatccagtacacctccaactactacaaatctacaagtgtggactttgctgttaatacagaaggcgtgtactctgaaccccgccccattggcacccgttacctcacccgtaatctgtaa

SEQ ID NO: 453 - protein, 736 aa, Artificial Sequence
  source: /note="Description of Artificial Sequence: Synthetic polypeptide"
MAADGYLPDWLEDNLSEGIREWWDLKPGAPKPKANQQKQDDGRGLVLPGYKYLGPFNGLDKGEPVNAADAAALEHDKAYDQQLEAGDNPYLRYNHADAEFQERLQEDTSFGGNLGRAVFQAKKRVLEPLGLVEEGAKTAPGKKRPVEQSPQEPDSSSGIGKKGQQPARKRLNFGQTGDSESVPDPQPLGEPPAAPSGVGPNTMAAGGGAPMADNNEGADGVGSSSGNWHCDSTWLGDRVITTSTRTWALPTYNNHLYKQISNGTSGGATNDNTYFGYSTPWGYFDFNRFHCHFSPRDWQRLINNNWGFRPKRLSFKLFNIQVKEVTQNEGTKTIANNLTSTIQVFTDSEYQLPYVLGSAHQGCLPPFPADVFMIPQYGYLTLNNGSQAVGRSSFYCLEYFPSQMLRTGNNFQFTYTFEDVPFHSSYAHSQSLDRLMNPLIDQYLYYLSRTQTTGGTANTQTLGFSQGGPNTMANQAKNWLPGPCYRQQRVSTTTGQNNNSNFAWTAGTKYHLNGRNSLANPGIAMATHKDDEERFFPVTGSCFWQQNAARDNADYSDVMLTSEEEIKTTNPVATEEYGIVADNLQQQNTAPQIGTVNSQGALPGMVWQNRDVYLQGPIWAKIPHTDGNFHPSPLMGGFGLKHPPPQILIKNTPVPADPPTTFNQSKLNSFITQYSTGQVSVEIEWELQKENSKRWNPEIQYTSNYYKSTSVDFAVNTEGVYSEPRPIGTRYLTRNL

SEQ ID NO: 454 - DNA, 2214 bp, Artificial Sequence
  source: /note="Description of Artificial Sequence: Synthetic polynucleotide"
atggctgctgacggttatcttccagattggctcgaggacaacctctctgagggcattcgcgagtggtgggacctgaaacctggagcccccaagcccaaggccaaccagcagaagcaggacgacggccggggtctggtgcttcctggctacaagtacctcggacccttcaacggactcgacaagggggagcccgtcagcgcggcggacgcagcggccctcgagcacgacaaggcctgcgaccagcggctcaaagcgggtgacaatccgtacctgcggtataaccacgccgacgccgagtttcaggagcgtctgcaagaagatacgtcttttgggggcaacctcgggcgagcagtcttccaggccaagaagcgggttctcgaacctctcggtctggttgaggaagctgctaagacggctcctggaaagaagggaccggtagaaccgtcacctcagcgttcccccgactcctccacgggcatcggcaagaaaggccagcagcccgctagaaagagactgaactttgggcagactggcgactcagagtcagtccccgaccctcaaccaatcggagaaccaccagcaggcccctctggtctgggatctggtacaatggctgcaggcggtggcgcaccaatggctgacaataacgagggcgccgacggagtgggtaatgcctcaggaaattggcattgcgattccacatggctgggcgacagagtcatcaccaccagcacccgaacctgggctttgcccacctacaacaatcacctctacaagcaaatctccagtcagtcagcaggtagcaccaacgacaacgtctacttcggctacagcaccccctgggggtattttgacttcaacagattccactgtcacttctcaccacgtgactggcagcggctcatcaacaacaactggggattccggcccaagaagctcaacttcaagctgttcaacatccaggtcaaggaggtcacaacgaatgacggcgtcacgaccatcgccaataaccttaccagcacggttcaggtcttttcggactcggaataccagctgccctacgtcctcggctccgcacaccagggctgcctgcctccgttcccggcggacgtcttcatgattccccagtacggctacctgactctgaacaatggcagccaatcggtgggtcgttcctctttctactgcctggaatatttcccttctcaaatgctgagaacgggcaacaacttcaccttcagctacaccttcgaggacgttcccttccacagcagctacgcacacagccagagcctggaccggctgatgaatcctcttatcgaccagtacctgtattacctggccagaacacagagcaacgcaggaggcacagctggcaatcgggaactgcagttttatcagggcgggcctaccaccatggccgaacaagccaaaaactggctgcctggaccttgcttccggcaacaaagagtctccaagacgctggatcaaaacaacaacagcaactttgcttggactggtgccaccaaataccatctaaatggaagaaattcattggttaatcccggtgtcgccatggcaacccacaaggacgacgaggaacgcttcttcccttcgagcggagtcctgatttttggaaaaactggagcagctaataagactacactggaaaatgtgttaatgacaaatgaagaggaaattcgtcctaccaacccggtagccaccgaggaatacgggactgttagcagcaacctgcaggcggctaacactgcagcccagacacaagttgtcaacaaccagggagccttacctggtatggtctggcagaaccgggacgtgtacctgcagggtcccatctgggccaagattcctcacacggacggcaactttcacccgtctccgctgatgggcggctttggactgaagcatccgcctcctcagatcctgatcaaaaacactcctgttcctgctaatcccccggaggtgtttacgcctgccaagtttgcttctttcatcacacagtacagcaccggccaggtcagcgtggagatcgagtgggagctgcagaaggagaacagcaagcgctggaacccagagattcagtatacctccaattttgacgaacagactggtgtggactttgccgttgacagccagggtgtttattctgagcctcgccccattggtactcgttacctcacccgtaatctgtaa

SEQ ID NO: 455 - protein, 737 aa, Artificial Sequence
  source: /note="Description of Artificial Sequence: Synthetic polypeptide"
MAADGYLPDWLEDNLSEGIREWWDLKPGAPKPKANQQKQDDGRGLVLPGYKYLGPFNGLDKGEPVSAADAAALEHDKACDQRLKAGDNPYLRYNHADAEFQERLQEDTSFGGNLGRAVFQAKKRVLEPLGLVEEAAKTAPGKKGPVEPSPQRSPDSSTGIGKKGQQPARKRLNFGQTGDSESVPDPQPIGEPPAGPSGLGSGTMAAGGGAPMADNNEGADGVGNASGNWHCDSTWLGDRVITTSTRTWALPTYNNHLYKQISSQSAGSTNDNVYFGYSTPWGYFDFNRFHCHFSPRDWQRLINNNWGFRPKKLNFKLFNIQVKEVTTNDGVTTIANNLTSTVQVFSDSEYQLPYVLGSAHQGCLPPFPADVFMIPQYGYLTLNNGSQSVGRSSFYCLEYFPSQMLRTGNNFTFSYTFEDVPFHSSYAHSQSLDRLMNPLIDQYLYYLARTQSNAGGTAGNRELQFYQGGPTTMAEQAKNWLPGPCFRQQRVSKTLDQNNNSNFAWTGATKYHLNGRNSLVNPGVAMATHKDDEERFFPSSGVLIFGKTGAANKTTLENVLMTNEEEIRPTNPVATEEYGTVSSNLQAANTAAQTQVVNNQGALPGMVWQNRDVYLQGPIWAKIPHTDGNFHPSPLMGGFGLKHPPPQILIKNTPVPANPPEVFTPAKFASFITQYSTGQVSVEIEWELQKENSKRWNPEIQYTSNFDEQTGVDFAVDSQGVYSEPRPIGTRYLTRNL

SEQ ID NO: 456 - DNA, 2214 bp, Artificial Sequence
  source: /note="Description of Artificial Sequence: Synthetic polynucleotide"
atggctgccgatggttatcttccagattggctcgaggacaacctctctgagggcattcgcgagtggtgggacctgaaacctggagccccgaaacccaaagccaaccagcaaaagcaggacgacggccggggtctggtgcttcctggctacaagtacctcggacccttcaacggactcgacaagggggagcccgtcaacgcggcggacgcagcggccctcgagcacgacaaggcctacgaccagcagctcaaagcgggtgacaatccgtacctgcggtataaccacgccgacgccgagtttcaggagcgtctgcaagaagatacgtcttttgggggcaacctcgggcgagcagtcttccaggccaagaagcgggttctcgaacctctcggtctggttgaggaagctgctaagacggctcctggaaagaagagaccggtagaaccgtcacctcagcgttcccccgactcctccacgggcatcggcaagaaaggccagcagcccgctagaaagagactgaactttgggcagactggcgactcagagtcagtccccgaccctcaaccaatcggagaaccaccagcaggcccctctggtctgggatctggtacaatggctgcaggcggtggcgctccaatggcagacaataacgaaggcgccgacggagtgggtaatgcctcaggaaattggcattgcgattccacatggctgggcgacagagtcatcaccaccagcacccgaacctgggctttgcccacctacaacaaccacctctacaagcaaatctccagtcagtcagcaggtagcaccaacgacaacgtctacttcggctacagcaccccctgggggtattttgacttcaacagattccactgtcacttctcaccacgtgactggcagcggctcatcaacaacaactggggattccggcccaagaagctcaacttcaagctgttcaacatccaggtcaaggaggtcacaacgaatgacggcgtcacgaccatcgccaataaccttaccagcacggttcaggtcttttcggactcggaataccagctgccctacgtcctcggctccgcacaccagggctgcctgcctccgttcccggcggacgtcttcatgattcctcagtacggctacctgactctcaacaacggtagtcaggccgtgggacgttcctccttctactgcctggagtacttcccctctcagatgctgagaacgggcaacaacttttccttcagctacactttcgaggacgtgcctttccacagcagctacgcgcacagccagagtttggacaggctgatgaatcctctcatcgaccagtacctgtactacctgtcaagaacccagtctacgggaggcacagcgggaacccagcagttgctgttttctcaggccgggcctagcaacatgtcgactcaggccagaaactggctgcctggaccctgctacagacagcagcgcgtctccacgacactgtcgcaaaacaacaacagcaactttgcctggactggtgccaccaagtatcatctgaacggcagagactctctggtgaatccgggcgtcgccatggcaaccaacaaggacgacgaggaccgcttcttcccatccagcggcatcctcatgtttggcaagcagggagctggaaaagacaacgtggactatagcaacgtgatgctaaccagcgaggaagaaatcaagaccaccaaccccgtggccacagaacagtatggcgtggtggctgataacctacagcagcaaaacaccgctcctattgtgggggccgtcaacagccagggagccttacctggcatggtctggcagaaccgggacgtgtacctgcagggtcctatttgggccaagattcctcacacagatggcaactttcacccgtctcctttaatgggcggctttggacttaaacatccgcctcctcagatccttatcaaaaacactcctgttcctgcggatcctccaacagcgttcaaccaggccaagctgaattctttcatcacgcagtacagcaccggacaagtcagcgtggagatcgagtgggagctgcagaaggagaacagcaagcgctggaacccagagattcagtatacttccaactactacaaatctacaaatgtggactttgctgttaatactgagggtgcttactctgagcctcgccccattggcactcgttacctcacccgtaatctgtaa

SEQ ID NO: 457 - protein, 737 aa, Artificial Sequence
  source: /note="Description of Artificial Sequence: Synthetic polypeptide"
MAADGYLPDWLEDNLSEGIREWWDLKPGAPKPKANQQKQDDGRGLVLPGYKYLGPFNGLDKGEPVNAADAAALEHDKAYDQQLKAGDNPYLRYNHADAEFQERLQEDTSFGGNLGRAVFQAKKRVLEPLGLVEEAAKTAPGKKRPVEPSPQRSPDSSTGIGKKGQQPARKRLNFGQTGDSESVPDPQPIGEPPAGPSGLGSGTMAAGGGAPMADNNEGADGVGNASGNWHCDSTWLGDRVITTSTRTWALPTYNNHLYKQISSQSAGSTNDNVYFGYSTPWGYFDFNRFHCHFSPRDWQRLINNNWGFRPKKLNFKLFNIQVKEVTTNDGVTTIANNLTSTVQVFSDSEYQLPYVLGSAHQGCLPPFPADVFMIPQYGYLTLNNGSQAVGRSSFYCLEYFPSQMLRTGNNFSFSYTFEDVPFHSSYAHSQSLDRLMNPLIDQYLYYLSRTQSTGGTAGTQQLLFSQAGPSNMSTQARNWLPGPCYRQQRVSTTLSQNNNSNFAWTGATKYHLNGRDSLVNPGVAMATNKDDEDRFFPSSGILMFGKQGAGKDNVDYSNVMLTSEEEIKTTNPVATEQYGVVADNLQQQNTAPIVGAVNSQGALPGMVWQNRDVYLQGPIWAKIPHTDGNFHPSPLMGGFGLKHPPPQILIKNTPVPADPPTAFNQAKLNSFITQYSTGQVSVEIEWELQKENSKRWNPEIQYTSNYYKSTNVDFAVNTEGAYSEPRPIGTRYLTRNL

SEQ ID NO: 458 - DNA, 2217 bp, Artificial Sequence
  source: /note="Description of Artificial Sequence: Synthetic polynucleotide"
atggctgccgatggttatcttccagattggctcgaggacaacctctctgagggcattcgcgagtggtgggacctgaaacctggagccccgaaacccaaagccaaccagcaaaagcaggacgacggccggggtctggtgcttcctggctacaagtacctcggacccttcaacggactcgacaagggggagcccgtcaacgcggcggacgcagcggccctcgagcacgacaaggcctacgaccagcagctcaaagcgggtgacaatccgtacctgcggtataatcacgccgacgccgagtttcaggagcgtctgcaagaagatacgtcttttgggggcaacctcgggcgagcagtcttccaggccaagaagcgggttctcgaacctctcggtctggttgaggaaggcgctaagacggctcctggaaagaagagaccggtagagccgtcaccacagcgttcccccgactcctccacgggcatcggcaagaaaggccagcagcccgccagaaagagactcaatttcggtcagactggcgactcagagtcagtccccgaccctcaacctatcggagaacctccagcagcgccctctagtgtgggatctggtacaatggctgcaggcggtggcgcaccaatggcagacaataacgaaggtgccgacggagtgggtagttcctcgggaaattggcattgcgattccacatggctgggcgacagagtcatcaccaccagcacccgaacctgggccctgcccacctacaacaaccacctctacaagcaaatctccaacgggacctcgggaggcagcaccaacgacaacacctactttggctacagcaccccctgggggtattttgactttaacagattccactgccacttctcaccacgtgactggcagcgactcatcaacaacaactggggattccggcccaagagactcagcttcaagctcttcaacatccaggtcaaagaggtcacgcagaatgaaggcaccaagaccatcgccaataacctcaccagcaccatccaggtgtttacggactcggaataccagctgccgtacgtcctcggctctgcccaccagggctgcctgcctccgttcccggcggacgtcttcatgattcctcagtacggctacctgactctcaacaacggtagtcaggccgtgggacgttcctccttctactgcctggagtacttcccctctcagatgctgagaacgggcaacaacttttccttcagctacactttcgaggacgtgcctttccacagcagctacgcgcacagccagagtttggacaggctgatgaatcctctcatcgaccagtacctgtactacctgtcaagaacccagtctacgggaggcacagcgggaacccagcagttgctgttttctcaggccgggcctagcaacatgtcggctcaggccagaaactggctgcctggaccctgctacagacagcagcgcgtctccacgacactgtcgcaaaacaacaacagcaactttgcctggactggtgccaccaagtatcatctgaacggcagagactctctggtgaatccgggcgtcgccatggcaaccaacaaggacgacgaggaccgcttcttcccatccagcggcatcctcatgtttggcaagcagggagctggaaaagacaacgtggactatagcaacgtgatgctaaccagcgaggaagaaatcaaggccaccaaccccgtggccacagaacagtatggcgtggtggctgataacctacagcagcaaaacaccgctcctattgtgggggccgtcaacagccagggagccttacctggcatggtctggcagaaccgggacgtgtacctgcagggtcctatttgggccaagattcctcacacagatggcaactttcacccgtctcctttaatgggcggctttggacttaaacatccgcctcctcagatcctcatcaaaaacactcctgttcctgcggatcctccaacagcgttcaaccaggccaagctgaattctttcatcacgcagtacagcaccggacaagtcagcgtggagatcgagtgggagctgcagaaggagaacagcaagcgctggaacccagagattcagtatacttccaactactacaaatctacaaatgtggactttgctgttaatactgagggtgtttactctgagcctcgccccattggcactcgttacctcacccgtaatctgtaa

SEQ ID NO: 459 - protein, 738 aa, Artificial Sequence
  source: /note="Description of Artificial Sequence: Synthetic polypeptide"
MAADGYLPDWLEDNLSEGIREWWDLKPGAPKPKANQQKQDDGRGLVLPGYKYLGPFNGLDKGEPVNAADAAALEHDKAYDQQLKAGDNPYLRYNHADAEFQERLQEDTSFGGNLGRAVFQAKKRVLEPLGLVEEGAKTAPGKKRPVEPSPQRSPDSSTGIGKKGQQPARKRLNFGQTGDSESVPDPQPIGEPPAAPSSVGSGTMAAGGGAPMADNNEGADGVGSSSGNWHCDSTWLGDRVITTSTRTWALPTYNNHLYKQISNGTSGGSTNDNTYFGYSTPWGYFDFNRFHCHFSPRDWQRLINNNWGFRPKRLSFKLFNIQVKEVTQNEGTKTIANNLTSTIQVFTDSEYQLPYVLGSAHQGCLPPFPADVFMIPQYGYLTLNNGSQAVGRSSFYCLEYFPSQMLRTGNNFSFSYTFEDVPFHSSYAHSQSLDRLMNPLIDQYLYYLSRTQSTGGTAGTQQLLFSQAGPSNMSAQARNWLPGPCYRQQRVSTTLSQNNNSNFAWTGATKYHLNGRDSLVNPGVAMATNKDDEDRFFPSSGILMFGKQGAGKDNVDYSNVMLTSEEEIKATNPVATEQYGVVADNLQQQNTAPIVGAVNSQGALPGMVWQNRDVYLQGPIWAKIPHTDGNFHPSPLMGGFGLKHPPPQILIKNTPVPADPPTAFNQAKLNSFITQYSTGQVSVEIEWELQKENSKRWNPEIQYTSNYYKSTNVDFAVNTEGVYSEPRPIGTRYLTRNL

SEQ ID NO: 460 - DNA, 2217 bp, Artificial Sequence
  source: /note="Description of Artificial Sequence: Synthetic polynucleotide"
atggctgccgatggttatcttccagattggctcgaggacaacctctctgagggcattcgcgagtggtgggacctgaaacctggagccccgaaacccaaagccaaccagcaaaagcaggacgacggccggggtctggtgcttcctggctacaagcacctcggacccttcaacggactcgacaagggggagcccgtcaacgcggcggacgcagcggccctcgagcacgacaaggcctacgaccagcagctcaaagcgggtgacaatccgtacctgcggtataatcacgctgacgccgagtttcaggagcgtctgcaagaagatacgtcttttgggggcaacctcgggcgagcagtcttccaggccaagaagcgggttctcgaacctctcggtctggttgaggaaggcgctaagacggctcctggaaagaagagaccggtagagccgtcaccacagcgttcccccgactcctccacgggcatcggcaagaaaggccagcagcccgccagaaagagactcaatttcggtcagactggcgactcagagtcagtccccgaccctcaacctatcggagaacctccagcagcgccctctagtgtgggatctggtacaatggctgcaggcggtggcgcaccaatggcagacaataacgaaggtgccgacggagtgggtagttcctcgggaaattggcattgcgattccacatggctgggcgacagagtcatcaccaccagcacccgaacctgggccctgcccacctacaacaaccacctctacaagcaaatctccaacgggacctcgggaggcagcaccaacgacaacacctactttggctacagcaccccctgggggtattttgactttaacagattccactgccacttctcaccacgtgactggcagcgactcatcaacaacaactggggattccggcccaagagactcagcttcaagctcttcaacatccaggtcaaagaggtcacgcagaatgaaggcaccaagaccatcgccaataaccttaccagcacggttcaggtcttttcggactcggaataccagctgccctacgtcctcggctccgcacaccagggctgcctgcctccgttcccggcggacgtcttcatgattccccagtacggctacctgactctgaacaatggcagccaatcggtgggtcgttcctctttctactgcctggaatatttcccttctcaaatgctgagaacgggcaacaacttcaccttcagctacaccttcgaggacgttcccttccacagcagctacgcacacagccagagcctggaccggctgatgaatcctcttatcgaccagtacctgtattacctggccagaacacagagcaacgcaggaggcacagctggcaatcgggaactgcagttttatcagggcgggcctaccaccatggccgaacaagccaaaaactggctgcctggaccttgcttccggcaacaaagagtctccaagacgctggatcaaaacaacaacagcaactttgcttggactggtgccaccaaataccatctaaatggaagaaattcattggttaatcccggtgtcgccatggcaacccacaaggacgacgaggaacgcttcttcccttcgagcggagtcctgatttttggaaaaactggagcagctaataagactacactggaaaatgtgttaatgacaaatgaagaggaaattcgtcctaccaacccggtagccaccgaggaatacgggactgttagcagcaacctgcaggcggctaacactgcagcccagacacaagttgtcaacaaccagggagccttacctggtatggtctggcagaaccgggacgtgtacctgcagggtcccatctgggccaagattcctcacacggacggcaactttcacccgtctccgctgatgggcggctttggactgaagcatccgcctcctcagatcctgatcaaaaacactcctgttcctgctaatcccccggaggtgtttacgcctgccaagtttgcttctttcatcacacagtacagcaccggccaggtcagcgtggagatcgagtgggagctgcagaaggagaacagcaagcgctggaacccagagattcagtatacctccaattttgacaaacagactggtgtggactttgccgttgacagccagggtgtttattctgagcctcgccccattggtactcgttacctcacccgtaatctgtaa

SEQ ID NO: 461 - protein, 738 aa, Artificial Sequence
  source: /note="Description of Artificial Sequence: Synthetic polypeptide"
MAADGYLPDWLEDNLSEGIREWWDLKPGAPKPKANQQKQDDGRGLVLPGYKHLGPFNGLDKGEPVNAADAAALEHDKAYDQQLKAGDNPYLRYNHADAEFQERLQEDTSFGGNLGRAVFQAKKRVLEPLGLVEEGAKTAPGKKRPVEPSPQRSPDSSTGIGKKGQQPARKRLNFGQTGDSESVPDPQPIGEPPAAPSSVGSGTMAAGGGAPMADNNEGADGVGSSSGNWHCDSTWLGDRVITTSTRTWALPTYNNHLYKQISNGTSGGSTNDNTYFGYSTPWGYFDFNRFHCHFSPRDWQRLINNNWGFRPKRLSFKLFNIQVKEVTQNEGTKTIANNLTSTVQVFSDSEYQLPYVLGSAHQGCLPPFPADVFMIPQYGYLTLNNGSQSVGRSSFYCLEYFPSQMLRTGNNFTFSYTFEDVPFHSSYAHSQSLDRLMNPLIDQYLYYLARTQSNAGGTAGNRELQFYQGGPTTMAEQAKNWLPGPCFRQQRVSKTLDQNNNSNFAWTGATKYHLNGRNSLVNPGVAMATHKDDEERFFPSSGVLIFGKTGAANKTTLENVLMTNEEEIRPTNPVATEEYGTVSSNLQAANTAAQTQVVNNQGALPGMVWQNRDVYLQGPIWAKIPHTDGNFHPSPLMGGFGLKHPPPQILIKNTPVPANPPEVFTPAKFASFITQYSTGQVSVEIEWELQKENSKRWNPEIQYTSNFDKQTGVDFAVDSQGVYSEPRPIGTRYLTRNL

SEQ ID NO: 462 - protein, 737 aa, Artificial Sequence
  source: /note="Description of Artificial Sequence: Synthetic polypeptide"
MAADGYLPDWLEDNLSEGIREWWDLKPGAPKPKANQQKQDDGRGLVLPGYKYLGPFNGLDKGEPVNAADAAALEHDKAYDQQLKAGDNPYLRYNHADAEFQERLQEDTSFGGNLGRAVFQAKKRVLEPLGLVEEAAKTAPGKKRPVEPSPQRSPDSSTGIGKKGQQPARKRLNFGQTGDSESVPDPQPIGEPPAGPSGLGSGTMAAGGGAPMADNNKGADGVGNASGNWHCDSTWLGDRVITTSTRTWALPTYNNHLYKQISSQSAGSTNDNVYFGYSTPWGYFDFNRFHCHFSPRDWQRLINSNWGFRPKKLNFKLFNIQVKEVTTNDGVTTIANNLTSTVQVFSDSEYQLPYVLGSAHQGCLPPFPADVFMIPQYGYLTLNNGSQSVGRSSFYCLEYFPSQMLRTGNNFTFSYTFEDVPFHSSYAHSQSLDRLMNPLIDQYLYYLARTQSNAGGTAGNRELQFYQGGPTTMAEQAKNWLPGPCFRQQRVSKTLDQNNNSNFAWTGATKYHLNGRNSLVNPGVAMATHKDDEERFFPSSGVLIFGKTGAANKTTLENVLMTNEEEIRPTNPVATEEYGTVSSNLQAANTAAQTQVVNNQGALPGMVWQNRDVYLQGPIWAKIPHTDGNFHPSPLMGGFGLKHPPPQILIKNTPVPANPPEVFTPAKFASFITQYSTGQVSVEIEWELQKENSKRWNPEIQYTSNFDKQTGVDFAVDSQGVYSEPRPIGTRYLTRNL

SEQ ID NO: 463 - protein, 737 aa, Artificial Sequence
  source: /note="Description of Artificial Sequence: Synthetic polypeptide"
MAADGYLPDWLEDNLSEGIREWWDLKPGAPKPKANQQKQDDGRGLVLPGYKYLGPFNGLDKGEPVNAADAAALEHDKAYDQQLKAGDNPYLRYNHADAEFQERLQEDTSFGGNLGRAVFQAKKRVLEPLGLVEEAAKTAPGKKRPVEPSPQRSPDSSTGIGKKGQQPARKRLNFGQTGDSESVPDPQPIGEPPAGPSGLGSGTMAAGGGAPMADNNEGADGVGNASGNWHCDSTWLGDRVITTSTRTWALPTYNNHLYKQISSQSAGSTNDNVYFGYSTPWGYFDFNRFHCHFSPRDWQRLINSNWGFRPKKLNFKLFNIQVKEVTTNDGVTTIANNLTSTVQVFSDSEYQLPYVLGSAHQGCLPPFPADVFMIPQYGYLTLNNGSQSVGRSSFYCLEYFPSQMLRTGNNFTFSYTFEDVPFHSSYAHSQSLDRLMNPLIDQYLYYLARTQSNAGGTAGNRELQFYQGGPTTMAEQAKNWLPGPCFRQQRVSKTLDQNNNSNFAWTGATKYHLNGRNSLVNPGVAMATHKDDEERFFPSSGVLIFGKTGAANKTTLENVLMTNEEEIRPTNPVATEEYGTVSSNLQAANTAAQTQVVNNQGALPGMVWQNRDVYLQGPIWAKIPHTDGNFHPSPLMGGFGLKHPPPQILIKNTPVPANPPEVFTPAKFASFITQYSTGQVSVEIEWELQKENSKRWNPEIQYTSNFDKQTGVDFAVDSQGVYSEPRPIGTRYLTRNL

SEQ ID NO: 464 - protein, 737 aa, Artificial Sequence
  source: /note="Description of Artificial Sequence: Synthetic polypeptide"
MAADGYLPDWLEDNLSEGIREWWDLKPGAPKPKANQQKQDDGRGLVLPGYKYLGPFNGLDKGEPVNAADAAALEHDKAYDQQLKAGDNPYLRYNHADAEFQERLQEDTSFGGNLGRAVFQAKKRVLEPLGLVEEAAKTAPGKKRPVEPSPQRSPDSSTGIGKKGQQPARKRLNFGQTGDSESVPDPQPIGEPPAGPSGLGSGTMAAGGGAPMADNNEGADGVGNASGNWHCDSTWLGDRVITTSTRTWALPTYNNHLYKQISSQSAGSTNDNVYFGYSTPWGYFDFNRFHCHFSPRDWQRLINNNWGFRPKKLNFKLFNIQVKEVTTNDGVTTIANNLTSTVQVFSDSEYQLPYVLGSAHQGCLPPFPADVFMIPQYGYLTLNNGSQSVGRSSFYCLEYFPSQMLRTGNNFTFSYTFEDVPFHSSYAHSQSLDRLMNPLIDQYLYYLARTQSNAGGTAGNRELQFYQGGPTTMAEQAKNWLPGPCFRQQRVSKTLDQNNNSNFAWTGATKYHLNGRNSLVNPGVAMATHKDDEERFFPSSGVLIFGKTGAANKTTLENVLMTNEEEIRPTNPVATEEYGTVSSNLQAANTAAQTQVVNNQGALPGMVWQNRDVYLQGPIWAKIPHTDGNFHPSPLMGGFGLKHPPPQILIKNTPVPANPPEVFTPAKFASFITQYSTGQVSVEIEWELQKENSKRWNPEIQYTSNFDKQTGVDFAVDSQGVYSEPRPIGTRYLTRNL

SEQ ID NO: 465 - protein, 737 aa, Artificial Sequence
  source: /note="Description of Artificial Sequence: Synthetic polypeptide"
MAADGYLPDWLEDNLSEGIREWWDLKPGAPKPKANQQKQDDGRGLVLPGYKYLGPFNGLDKGEPVNAADAAALEHDKAYDQQLKAGDNPYLRYNHADAEFQERLQEDTSFGGNLGRAVFQAKKRVLEPLGLVEEAAKTAPGKKRPVEPSPQRSPDSSTGIGKKGQQPARKRLNFGQTGDSESVPDPQPIGEPPAGPSGLGSGTMAAGGGAPMADNNKGADGVGNASGNWHCDSTWLGDRVITTSTRTWALPTYNNHLYKQISSQSAGSTNDNVYFGYSTPWGYFDFNRFHCHFSPRDWQRLINNNWGFRPKKLNFKLFNIQVKEVTTNDGVTTIANNLTSTVQVFSDSEYQLPYVLGSAHQGCLPPFPADVFMIPQYGYLTLNNGSQSVGRSSFYCLEYFPSQMLRTGNNFTFSYTFEDVPFHSSYAHSQSLDRLMNPLIDQYLYYLARTQSNAGGTAGNRELQFYQGGPTTMAEQAKNWLPGPCFRQQRVSKTLDQNNNSNFAWTGATKYHLNGRNSLVNPGVAMATHKDDEERFFPSSGVLIFGKTGAANKTTLENVLMTNEEEIRPTNPVATEEYGTVSSNLQAANTAAQTQVVNNQGALPGMVWQNRDVYLQGPIWAKIPHTDGNFHPSPLMGGFGLKHPPPQILIKNTPVPANPPEVFTPAKFASFITQYSTGQVSVEIEWELQKENSKRWNPEIQYTSNFDKQTGVDFAVDSQGVYSEPRPIGTRYLTRNL

SEQ ID NO: 466 - DNA, 2214 bp, Artificial Sequence
  source: /note="Description of Artificial Sequence: Synthetic polynucleotide"
atggctgctgacggttatcttccagattggctcgaggacaacctctctgagggcattcgcgagtggtgggacctgaaacctggagcccccaagcccaaggccaaccagcagaagcaggacgacggccggggtctggtgcttcctggctacaagtacctcggacccttcaacggactcgacaagggggagcccgtcaacgcggcggacgcagcggccctcgagcacgacaaggcctacgaccagcagctcaaagcgggtgacaatccgtacctgcggtataaccacgccgacgccgagtttcaggagcgtctgcaagaagatacgtcttttgggggcaacctcgggcgagcagtcttccaggccaagaagcgggttctcgaacctctcggtctggttgaggaagctgctaagacggctcctggaaagaagagaccggtagaaccgtcacctcagcgttcccccgactcctccacgggcatcggcaagaaaggccagcagcccgctagaaagagactgaactttgggcagactggcgactcagagtcagtccccgaccctcaaccaatcggagaaccaccagcaggcccctctggtctgggatctggtacaatggctgcaggcggtggcgcaccaatggctgacaataacaagggcgccgacggagtgggtaatgcctcaggaaattggcattgcgattccacatggctgggcgacagagtcatcaccaccagcacccgaacctgggctttgcccacctacaacaaccacctctacaagcaaatctccagtcagtcagcaggtagcaccaacgacaacgtctacttcggctacagcaccccctgggggtattttgacttcaacagattccactgtcacttctcaccacgtgactggcagcggctcatcaacagcaactggggattccggcccaagaagctcaacttcaagctgttcaacatccaggtcaaggaggtcacaacgaatgacggcgtcacgaccatcgccaataaccttaccagcacggttcaggtcttttcggactcggaataccagctgccctacgtcctcggctccgcacaccagggctgcctgcctccgttcccggcggacgtcttcatgattccccagtacggctacctgactctgaacaatggcagccaatcggtgggtcgttcctctttctactgcctggaatatttcccttctcaaatgctgagaacgggcaacaacttcaccttcagctacaccttcgaggacgttcccttccacagcagctacgcacacagccagagcctggaccggctgatgaatcctcttatcgaccagtacctgtattacctggccagaacacagagcaacgcaggaggcacagctggcaatcgggaactgcagttttatcagggcgggcctaccaccatggccgaacaagccaaaaactggctgcctggaccttgcttccggcaacaaagagtctccaagacgctggatcaaaacaacaacagcaactttgcttggactggtgccaccaaataccatctaaatggaagaaattcattggttaatcccggtgtcgccatggcaacccacaaggacgacgaggaacgcttcttcccttcgagcggagtcctgatttttggaaaaactggagcagctaataagactacactggaaaatgtgttaatgacaaatgaagaggaaattcgtcctaccaacccggtagccaccgaggaatacgggactgttagcagcaacctgcaggcggctaacactgcagcccagacacaagttgtcaacaaccagggagccttacctggtatggtctggcagaaccgggacgtgtacctgcagggtcccatctgggccaagattcctcacacggacggcaactttcacccgtctccgctgatgggcggctttggactgaagcatccgcctcctcagatcctgatcaaaaacactcctgttcctgctaatcccccggaggtgtttacgcctgccaagtttgcttctttcatcacacagtacagcaccggccaggtcagcgtggagatcgagtgggagctgcagaaggagaacagcaagcgctggaacccagagattcagtatacctccaattttgacaaacagactggtgtggactttgccgttgacagccagggtgtttattctgagcctcgccccattggtactcgttacctcacccgtaatctgtaa

SEQ ID NO: 467 - DNA, 2217 bp, Artificial Sequence
  source: /note="Description of Artificial Sequence: Synthetic polynucleotide"
atggctgccgatggttatcttccagattggctcgaggacaacctctctgagggcattcgcgagtggtgggacctgaaacctggagccccgaaacccaaagccaaccagcaaaagcaggacgacggccggggtctggtgcttcctggctacaagtacctcggacccttcaacggactcgacaagggggagcccgtcaacgcggcggacgcagcggccctcgagcacgacaaggcctacgaccagcagctcaaagcgggtgacaatccgcacctgcggtataatcacgccgacgccgagtttcaggagcgtctgcaagaagatacgtcttttgggggcaacctcgggcgagcagtcttccaggccaagaagcgggttctcgaacctctcggtctggttgaggaaggcgctaagacggctcctggaaagaagagaccggtagagccgtcaccacagcgttcccccgactcctccacgggcatcggcaagaaaggccagcagcccgccagaaagagactcaatttcggtcagactggcgactcagagtcagtccccgaccctcaacttatcggagaacctccagcagcgccctctagtgtgggatctggtacaatggctgcaggcggtggcgcaccaatggcagacaataacgaaggtgccgacggagtgggtagttcctcgggaaattggcattgcgattccacatggctgggcgacagagtcatcaccaccagcacccgaacctgggccctgcccacctacaacaaccacctctacaagcaaatctccaacgggacctcgggaggcagcaccaacgacaacacctactttggctacagcaccccctgggggtattttgactttaacagattccactgccacttctcaccacgtgactggcagcgactcatcaacaacaactggggattccggcccaagagactcagcttcaagctcttcaacatccaggtcaaagaggtcacgcagaatgaaggcaccaagaccatcgccaataacctcaccagcaccatccaggtgtttacggactcggagtaccagctgccgtacgtcctcggctctgcccaccagggctgcctgcctccgttcccggcggacgtcttcatgattcctcagtacggcaacctgactctcaacaacggtagtcaggccgtgggacgttcctccttctactgcctggagtacttcccctctcagatgctgagaacgggcaacaacttttccttcagctacactttcgaggacgtgcctttccacagcagctacgcgcacagccagagtttggacaggctgatgaatcctctcatcgaccagtacctgtactacctgtcaagaacccagtctacgggaggcacagcgggaacccagcagttgctgttttctcaggccgggcctagcaacatgtcggctcaggccagaaactggctgcctggaccctgctacagacagcagcgcgtctccacgacactgtcgcaaaacaacaacagcaactttgcctggactggtgccaccaagtatcatctgaacggcagagactctctggtgaatccgggcgtcgccatggcaaccaacaaggacgacgaggaccgcttcttcccatccagcggcatcctcatgtttggcaagcagggagctggaaaagacaacatgggctatagcaacgtgatgctaaccagcgaggaagaaatcaagaccaccaaccccgtggccacagaacagtatggcgtggtggctgataacctacagcagcaaaacaccgctcctattgtgggggccgtcaacagccagggagccttacctggcatggtctggcagaaccgggacgtgtacctgcagggtcctatttgggccaagattcctcacacagatggcaactttcacccgtctcctttaatgggcggctttggacttaaacatccgcctcctcagatcctcatcaaaaacactcctgttcctgcggatcctccaacagcgttcaaccaggccaagctgaattctttcatcacgcagtacggcaccggacaagtcagcgtggagatcgagtgggagctgcagaaggagaacagcaagcgctggaacccagagattcagtatacttccaactactacaaatctacaaatgtggactttgctgttaatactgagggtgtttactctgagcctcgccccattggcactcgttacctcacccgtaatctgtaa

SEQ ID NO: 468 - protein, 738 aa, Artificial Sequence
  source: /note="Description of Artificial Sequence: Synthetic polypeptide"
MAADGYLPDWLEDNLSEGIREWWDLKPGAPKPKANQQKQDDGRGLVLPGYKYLGPFNGLDKGEPVNAADAAALEHDKAYDQQLKAGDNPHLRYNHADAEFQERLQEDTSFGGNLGRAVFQAKKRVLEPLGLVEEGAKTAPGKKRPVEPSPQRSPDSSTGIGKKGQQPARKRLNFGQTGDSESVPDPQLIGEPPAAPSSVGSGTMAAGGGAPMADNNEGADGVGSSSGNWHCDSTWLGDRVITTSTRTWALPTYNNHLYKQISNGTSGGSTNDNTYFGYSTPWGYFDFNRFHCHFSPRDWQRLINNNWGFRPKRLSFKLFNIQVKEVTQNEGTKTIANNLTSTIQVFTDSEYQLPYVLGSAHQGCLPPFPADVFMIPQYGNLTLNNGSQAVGRSSFYCLEYFPSQMLRTGNNFSFSYTFEDVPFHSSYAHSQSLDRLMNPLIDQYLYYLSRTQSTGGTAGTQQLLFSQAGPSNMSAQARNWLPGPCYRQQRVSTTLSQNNNSNFAWTGATKYHLNGRDSLVNPGVAMATNKDDEDRFFPSSGILMFGKQGAGKDNMGYSNVMLTSEEEIKTTNPVATEQYGVVADNLQQQNTAPIVGAVNSQGALPGMVWQNRDVYLQGPIWAKIPHTDGNFHPSPLMGGFGLKHPPPQILIKNTPVPADPPTAFNQAKLNSFITQYGTGQVSVEIEWELQKENSKRWNPEIQYTSNYYKSTNVDFAVNTEGVYSEPRPIGTRYLTRNL

SEQ ID NO: 469 - DNA, 2217 bp, Artificial Sequence
  source: /note="Description of Artificial Sequence: Synthetic polynucleotide"
atggctgccgatggttatcttccagattggctcgaggacaacctctctgagggcattcgcgagtggtgggacctgaaacctggagccccgaaacccaaagccaaccagcaaaagcaggacgacggccggggtctggtgcttcctggctacaagtacctcggacccttcaacggactcgacaagggggagcccgtcaacgcggcggacgcagcggccctcgagcacgacaaggcctacgaccagcagctcaaagcgggtgacaatccgtacctgcggtataatcacgccgacgccgagtttcaggagcgtctgcaagaagatacgtcttttgggggcaacctcgggcgagcagtcttccaggccaagaagcgggttctcgaacctctcggtctggttgaggaaggcgctaagacggctcctggaaagaagagaccggtagagccgtcaccacagcgttcccccgactcctccacgggcatcggcaagaaaggccagcagcccgccggaaagagactcaatttcggtcagactggcgactcagagtcagtccccgaccctcaacctatcggagaacctccagcagcgccctctagtgtgggatctggtacaatggctgcaggcggtggcgcaccaatggcagacaataacgaaggtgccgacggagtgggtagttcctcgggaaattggcattgcgattccacatggctgggcgacagagtcatcaccaccagcacccgaacctgggccctgcccacctacaacaaccacctctacaagcaaatctccaacgggacctcgggaggcagcaccaacgacaacacctactttggctacagcaccccctgggggtattttgactttaacagattccactgccacttctcaccacgtgactggcagcgactcatcaacaacaactggggattccggcccaagagactcagcttcaagctcttcaacatccaggtcaaagaggtcacgcagaatgaaggcaccaagaccatcgccaataacctcaccagcaccatccaggtgtttacggactcggaataccagctgccgtacgtcctcggctctgcccaccagggctgcctgcctccgttcccggcggacgtcttcatgattcctcagtacggctacctgactctcaacaacggtagtcaggccgtgggacgttcctccttctactgcctggagtacttcccctctcagatgctgagaacgggcaacaacttttccttcagctacactttcgaggacgtgcctttccacagcagctacgcgcacagccagagtttggacaggctgatgaatcctctcgtcgaccagtacctgtactacctgtcaagaacccagtctacgggaggcacagcgggaacccagcagttgctgttttctcaggccgggcctagcaacatgtcggctcaggccagaaactggctgcctggaccctgctacagacagcagcgcgtctccacgacactgtcgcaaaacaacaacagcaactttgcctggactggtgccaccaagtatcatctgaacggcagagactctctggtgaatccgggcgtcgccatggcaaccaacaaggacgacgaggaccgcttcttcccatccagcggcatcctcatgtttggcaagcagggagctggaaaagacaacgtggactatagcaacgtgatgctaaccagcgaggaagaaatcaagaccaccaaccccgtggccacagaacagtatggcgtggtggctgataacctacagcagcaaaacaccgctcctattgtgggggccgtcaacagccagggagccttacctggcatggtctggcagaaccgggacgtgtacctgcagggtcctatttgggccaagattcctcacacagatggcaactttcacccgtctcctttaatgggcggctttggacttaaacatccgcctcctcagatcctcatcaaaaacactcctgttcctgcggatcctccaacagcgttcaaccaggccaagctgaattctttcatcacgcagtacagcaccggacaagtcagcgtggagatcgagtgggagctgcagaaggagaacagcaagcgctggagcccagagattcagtatacttccaactactacaaatctacaaatgtggactttgctgttaatactgagggtgtttactctgagcctcgccccattggcactcgttacctcacccgtaatctgtaa

SEQ ID NO: 470 - protein, 738 aa, Artificial Sequence
  source: /note="Description of Artificial Sequence: Synthetic polypeptide"
MAADGYLPDWLEDNLSEGIREWWDLKPGAPKPKANQQKQDDGRGLVLPGYKYLGPFNGLDKGEPVNAADAAALEHDKAYDQQLKAGDNPYLRYNHADAEFQERLQEDTSFGGNLGRAVFQAKKRVLEPLGLVEEGAKTAPGKKRPVEPSPQRSPDSSTGIGKKGQQPAGKRLNFGQTGDSESVPDPQPIGEPPAAPSSVGSGTMAAGGGAPMADNNEGADGVGSSSGNWHCDSTWLGDRVITTSTRTWALPTYNNHLYKQISNGTSGGSTNDNTYFGYSTPWGYFDFNRFHCHFSPRDWQRLINNNWGFRPKRLSFKLFNIQVKEVTQNEGTKTIANNLTSTIQVFTDSEYQLPYVLGSAHQGCLPPFPADVFMIPQYGYLTLNNGSQAVGRSSFYCLEYFPSQMLRTGNNFSFSYTFEDVPFHSSYAHSQSLDRLMNPLVDQYLYYLSRTQSTGGTAGTQQLLFSQAGPSNMSAQARNWLPGPCYRQQRVSTTLSQNNNSNFAWTGATKYHLNGRDSLVNPGVAMATNKDDEDRFFPSSGILMFGKQGAGKDNVDYSNVMLTSEEEIKTTNPVATEQYGVVADNLQQQNTAPIVGAVNSQGALPGMVWQNRDVYLQGPIWAKIPHTDGNFHPSPLMGGFGLKHPPPQILIKNTPVPADPPTAFNQAKLNSFITQYSTGQVSVEIEWELQKENSKRWSPEIQYTSNYYKSTNVDFAVNTEGVYSEPRPIGTRYLTRNL

SEQ ID NO: 471 - DNA, 2217 bp, Artificial Sequence
  source: /note="Description of Artificial Sequence: Synthetic polynucleotide"
atggttgccgatggttatcttccagattggctcgaggacaacctctctgagggcattcgcgagtggtgggacctgaaacctggagccccgaaacccaaagccaaccagcaaaagcagggcgacggccggggtctggtgcttcctggctacaagtacctcggacccttcaacggactcgacaagggggagcccgtcaacgcggcggacgcagcggccctcgagcacgacaaggcctacgaccagcagcttaaagcgggtgacaatccgtacctgcggtataatcacgccgacgccgagcttcaggagcgtctgcaagaagatacgtcttttgggggcaacctcgggcgagcagtcttccaggccaagaagcgggttctcgaacctctcggtctggttgaggaaggcgctaagacggctcctggaaagaagagaccggtagagccgtcaccacagcgttcccccgactcctccacgggcatcggcaagaaaggccagcagcccgccagaaagagactcaatttcggtcagactggcgactcagagtcagtccccgaccctcaacctatcggagaacctccagcagcgccctctagtgtgggatctggtacaatggctgcaggcggtggcgcgccaatggcagacaataacgaaggtgccgacggagtgggtagttcctcgggaaattggcattgcgattccacatggctgggcgacagagtcatcaccaccagcacccgaacctgggccctgcccacctacaacaaccacctctacaagcaaatctccaacgggacctcgggaggcagcaccaacgacaacacctactttggctacagcaccccctgggggtattttgactttaacagattccactgccacttctcaccacgtgactggcagcgactcatcaacaacaactggggattccggcccaagagactcagcttcaagctcttcaacatccaggtcaaagaggtcacgcagaatgaaggcaccaagaccatcgccaataacctcaccagcaccatccaggtgtttacggactcggaataccagctgccgtacgtcctcggctctgcccaccagggctgccagcctccgttcccggcggacgtcttcatgattcctcagtacggctacctgactctcaacaacggtagtcaggccgtgggacgttcctccttctactgcctggagtacttcccctctcagatgctgagaacgggcaacaacttttccttcagctacactttcgaggacgtgcctttccacagcagctacgcgcacagccagagtttggacaggctgatgaatcctctcatcgaccagtacctgtactacctgtcaagaacccagtctacgggaggcacagcgggaacccagcagttgctgttttctcaggccgggcctagcaacatgtcggctcaggccagaaactggctgcctggaccctgctacagacagcagcgcgtctccacgacactgtcgcaaaacaacaacagcaactttgcctggactggtgccaccaagtatcatctgaacggcagagactctctggtgaatccgggcgtcgccatggcaaccaacaaggacgacgaggaccgcttcttcccatccagcggcatcctcatgtttggcaagcagggagctggaaaagacaacgtggactatagcaacgtgatgctaaccagcgaggaagaaatcaagaccaccaaccccgtggccacagaacagtatggcgtggtggctgataacctacagcagcaaaacaccgctcctattgtgggggccgtcaacagccagggagccttacctggcatggtctggcagaaccgggacgtgtacctgcagggtcctatttgggccaagattcctcacacagatggcaactttcacccgtctcctttaatgggcggctttggacttaaacatccgcctcctcagatcctcatcaaaaacactcctgttcctgcggatcctccaacagcgttcaaccaggccaagctgaattctttcatcacgcagtacagcaccggacaagtcagcgtggagatcgagtgggagccgcagaaggagaacagcaagcgctggaacccagagattcagtatacttccaactactacaaatctacaaatgtggactttgctgttaatactgagggtgtttactctgagcctcgccccattggcactcgttacctcacccgtaatctgtaa

SEQ ID NO: 472 - protein, 738 aa, Artificial Sequence
  source: /note="Description of Artificial Sequence: Synthetic polypeptide"
MVADGYLPDWLEDNLSEGIREWWDLKPGAPKPKANQQKQGDGRGLVLPGYKYLGPFNGLDKGEPVNAADAAALEHDKAYDQQLKAGDNPYLRYNHADAELQERLQEDTSFGGNLGRAVFQAKKRVLEPLGLVEEGAKTAPGKKRPVEPSPQRSPDSSTGIGKKGQQPARKRLNFGQTGDSESVPDPQPIGEPPAAPSSVGSGTMAAGGGAPMADNNEGADGVGSSSGNWHCDSTWLGDRVITTSTRTWALPTYNNHLYKQISNGTSGGSTNDNTYFGYSTPWGYFDFNRFHCHFSPRDWQRLINNNWGFRPKRLSFKLFNIQVKEVTQNEGTKTIANNLTSTIQVFTDSEYQLPYVLGSAHQGCQPPFPADVFMIPQYGYLTLNNGSQAVGRSSFYCLEYFPSQMLRTGNNFSFSYTFEDVPFHSSYAHSQSLDRLMNPLIDQYLYYLSRTQSTGGTAGTQQLLFSQAGPSNMSAQARNWLPGPCYRQQRVSTTLSQNNNSNFAWTGATKYHLNGRDSLVNPGVAMATNKDDEDRFFPSSGILMFGKQGAGKDNVDYSNVMLTSEEEIKTTNPVATEQYGVVADNLQQQNTAPIVGAVNSQGALPGMVWQNRDVYLQGPIWAKIPHTDGNFHPSPLMGGFGLKHPPPQILIKNTPVPADPPTAFNQAKLNSFITQYSTGQVSVEIEWEPQKENSKRWNPEIQYTSNYYKSTNVDFAVNTEGVYSEPRPIGTRYLTRNL

SEQ ID NO: 473 - DNA, 2217 bp, Artificial Sequence
  source: /note="Description of Artificial Sequence: Synthetic polynucleotide"
atggctgccgatggttatcttccagattggctcgaggacaacctctctgagggcattcgcgagtggtgggacctgaaacctggagccccgaaacccaaagccaaccagcaaaagcaggacgacggccggggtctggtgcttcctggctacaagtacctcggacccttcaacggactcgacaagggggagcccgtcaacgcggcggacgcagcggccctcgagcacgacaaggcctacgaccagcagctcaaagcgggtgacaatccgtacctgcggtataatcacgccgacgccgagtttcaggagcgtctgcaagaagatacgtcttttgggggcaacctcgggcgagcagtcttccaggccaagaagcgggttctcgaacctctcggtctggttgaggaaggcgctaagacggctcctggaaagaagagaccggtagagccgtcaccacagcgttcccccgactcctccacgggcatcggcaagaaaggccagcagcccgccagaaagagactcaatttcggtcagactggcgactcagagtcagtccccgaccctcaacctatcggagaacctccagcagcgccctctagtgtgggatctggtacaatggctgcaggcggtggcgcaccaatggcagacaataacgaaggtgccgacggagtgggtagttcctcgggaaattggcattgcgattccacatggctgggcgacagagtcatcaccaccagcacccgaacctgggccctgcccacctacaacaaccacctctacaagcaaatctccaacgggacctcgggaggcagcaccaacgacaacacctactttggctacagcaccccctgggggtattttgactttaacagattccactgccacttctcaccacgtgactggcagcgactcatcaacaacaactggggattccggcccaagagactcagcttcaagctcttcaacatccaggtcaaagaggtcacgcagaatgaaggcaccaagaccatcgccaatagcctcaccagcaccatccaggtgtttacggactcggaataccagctgccgtacgtcctcggctctgcccaccagggctgcctgcctccgttcccggcggacgtcttcatgattcctcagtacggctacctgactcccaacaacggtagtcaggccgtgggacgttcctccttctactgcctggagtacttcccctctcagatgctgagaacgggcaacaacttttccttcagctacactttcgaggacgtgcctttccacagcagctacgcgcacagccagagtttggacaggctgatgaatcctctcatcgaccagtacctgtactacctgtcaagaacccagtctacgggaggcacagcgggaacccagcagttgctgtcttctcaggccgggcctagcaacatgtcggctcaggccagaaactggctgcctggaccctgctacagacagcagcgcgtctccacgacactgtcgcaaaacaacaacagcaactttgcctggactggtgccaccaagtatcatctgaacggcagagactctctggtgaatccgggcgtcgccatggcaaccaacaaggacgacgaggaccgcttcttcccatccagcggcatcctcatgtttggcaagcagggagctggaaaagacaacgtggactatagcaacgtgatgctaaccagcgaggaagaaatcaagaccaccaaccccgtggccacagaacagtatggcgtggtggctgataacctacagcagcaaaacaccgctcctattgtgggggccgtcaacagccagggagccttacctggcatggtctggcagaaccgggacgtgtacttgcagggtcctatttgggccaagattcctcacacagatggcaactttcacccgtctcctttaatgggcggctttggacttaaacatccgcctcctcagatcctcatcaaaaacactcctgttcctgcggatcctccaacagcgttcaaccaggccaagctgaattctttcatcacgcagtacagcaccggacaagtcagcgtggagatcgagtgggagctgcagaaggagaacagcaagcgctggaacccagagattcagtatacttccaactactacaaatctacaaatgtggactttgctgttaatactgagggtgtttactctgagcctcgccccattggcactcgttacctcacccgtaatctgtaa

SEQ ID NO: 474 - protein, 738 aa, Artificial Sequence
  source: /note="Description of Artificial Sequence: Synthetic polypeptide"
MAADGYLPDWLEDNLSEGIREWWDLKPGAPKPKANQQKQDDGRGLVLPGYKYLGPFNGLDKGEPVNAADAAALEHDKAYDQQLKAGDNPYLRYNHADAEFQERLQEDTSFGGNLGRAVFQAKKRVLEPLGLVEEGAKTAPGKKRPVEPSPQRSPDSSTGIGKKGQQPARKRLNFGQTGDSESVPDPQPIGEPPAAPSSVGSGTMAAGGGAPMADNNEGADGVGSSSGNWHCDSTWLGDRVITTSTRTWALPTYNNHLYKQISNGTSGGSTNDNTYFGYSTPWGYFDFNRFHCHFSPRDWQRLINNNWGFRPKRLSFKLFNIQVKEVTQNEGTKTIANSLTSTIQVFTDSEYQLPYVLGSAHQGCLPPFPADVFMIPQYGYLTPNNGSQAVGRSSFYCLEYFPSQMLRTGNNFSFSYTFEDVPFHSSYAHSQSLDRLMNPLIDQYLYYLSRTQSTGGTAGTQQLLSSQAGPSNMSAQARNWLPGPCYRQQRVSTTLSQNNNSNFAWTGATKYHLNGRDSLVNPGVAMATNKDDEDRFFPSSGILMFGKQGAGKDNVDYSNVMLTSEEEIKTTNPVATEQYGVVADNLQQQNTAPIVGAVNSQGALPGMVWQNRDVYLQGPIWAKIPHTDGNFHPSPLMGGFGLKHPPPQILIKNTPVPADPPTAFNQAKLNSFITQYSTGQVSVEIEWELQKENSKRWNPEIQYTSNYYKSTNVDFAVNTEGVYSEPRPIGTRYLTRNL

SEQ ID NO: 475 - protein, 738 aa, Artificial Sequence
  source: /note="Description of Artificial Sequence: Synthetic polypeptide"
MAADGYLPDWLEDNLSEGIREWWDLKPGAPKPKANQQKQDDGRGLVLPGYKYLGPFNGLDKGEPVNAADAAALEHDKAYDQQLKAGDNPYLRYNHADAEFQERLQEDTSFGGNLGRAVFQAKKRVLEPLGLVEEGAKTAPGKKRPVEPSPQRSPDSSTGIGKKGQQPARKRLNFGQTGDSESVPDPQPIGEPPAAPSSVGSGTMAAGGGAPMADNNEGADGVGSSSGNWHCDSTWLGDRVITTSTRTWALPTYNNHLYKQISNGTSGGSTNDNTYFGYSTPWGYFDFNRFHCHFSPRDWQRLINNNWGFRPKRLSFKLFNIQVKEVTQNEGTKTIANNLTSTIQVFTDSEYQLPYVLGSAHQGCLPPFPADVFMIPQYGYLTLNNGSQAVGRSSFYCLEYFPSQMLRTGNNFSFSYTFEDVPFHSSYVHSQSLDRLMNPLIDQYLYYLSRTQSTGGTAGTQQLLFSQAGPSNMSAQARNWLPGPCYRQQRVSTTLSQNNNSNFAWTGATKYHLNGRDSLVNSGVAMATNKDDEDRFFPSSGILMFGKQGAGKDNVDYSNVMLTSEEEIKTTNPVATEQYGVVADNLQQQNTAPIVGAVNSQGALPGMVWQNRDVYLQGPIWAKIPHTDGNFHPSPLMGGFGLKHPPPQILIKNTPVPADPPTAFNQAKLNSFITQYSTGQVSVEIEWELQKENSKRWNPEIQYTSNYYKSTNVDFAVNTEGVYSEPRPIGTRYPTRNL

SEQ ID NO: 476 - DNA, 2217 bp, Artificial Sequence
  source: /note="Description of Artificial Sequence: Synthetic polynucleotide"
atggctgccgatggttatcttccagattggctcgaggacaacctctctgagggcattcgcgagtggtgggacctgaaacctggagccccgaaacccaaagccaaccagcaaaagcaggacgacggccggggtctggtgcttcctggctacaagtacctcggacccttcaacggactcgacaagggggagcccgtcaacgcggcggacgcagcggccctcgagcacgacaaggcctacgaccagcagctcaaagcgggtgacaatccgtacctgcggtataatcacgccgacgccgagtttcaggagcgtctgcaagaagatacgtcttttgggggcaacctcgggcgagcagtcttccaggccaagaagcgggttctcgaacctctcggtctggttgaggaaggcgctaagacggctcctggaaagaagagaccggtagagccgtcaccacagcgttcccccgactcctccacgggcatcggcaagaaaggccagcagcccgccagaaagagactcaatttcggtcagactggcgactcagagtcagtccccgaccctcaacctatcggagaacctccagcagcgccctctagtgtgggatctggtacaatggctgcaggcggtggcgcaccaatggcagacaataacgaaggtgccgacggagtgggtagttcctcgggaaattggcattgcgattccacatggctgggcgacagagtcatcaccaccagcacccgaacctgggccctgcccacctacaacaaccacctctacaagcaaatctccaacgggacctcgggaggcagcaccaacgacaacacctactttggctacagcaccccctgggggtattttgactttaacagattccactgccacttctcaccacgtgactggcagcgactcatcaacaacaactggggattccggcccaagagactcagcttcaagctcttcaacatccaggtcaaagaggtcacgcagaatgaaggcaccaagaccatcgccaataacctcaccagcaccatccaggtgtttacggactcggaataccagctgccgtacgtcctcggctctgcccaccagggctgcctgcctccgttcccggcggacgtcttcatgattcctcagtacggctacctgactctcaacaacggtagtcaggccgtgggacgttcctccttctactgcctggagtacttcccctctcagatgctgagaacgggcaacaacttttccttcagctacactttcgaggacgtgcctttccacagcagctacgtgcacagccagagtttggacaggctgatgaatcctctcatcgaccagtacctgtactacctgtcaagaacccagtctacgggaggcacagcgggaacccagcagttgctgttttctcaggccgggcctagcaacatgtcggctcaggccagaaactggctgcctggaccctgctacagacagcagcgcgtctccacgacactgtcgcaaaacaacaacagcaactttgcctggactggtgccaccaagtatcatctgaacggcagagactctctggtgaattcgggcgtcgccatggcaaccaacaaggacgacgaggaccgcttcttcccatccagcggcatcctcatgtttggcaagcagggagctggaaaagacaacgtggactatagcaacgtgatgctaaccagcgaggaagaaatcaagaccaccaaccccgtggccacagaacagtatggcgtggtggctgataacctacagcagcaaaacaccgctcctattgtgggggccgtcaacagccagggagccttacctggcatggtctggcagaaccgggacgtgtacctgcagggtcctatttgggccaagattcctcacacagatggcaactttcacccgtctcctttaatgggcggctttggacttaaacatccgcctcctcagatcctcatcaaaaacactcctgttcctgcggatcctccaacagcgttcaaccaggccaagctgaattctttcatcacgcagtacagcaccggacaagtcagcgtggagatcgagtgggagctgcagaaggagaacagcaagcgctggaacccagagattcagtatacttccaactactacaaatctacaaatgtggactttgctgttaatactgagggtgtttactctgagcctcgccccattggcactcgttaccccacccgtaatctgtaa

SEQ ID NO: 477 - protein, 734 aa, Artificial Sequence; identical to SEQ ID NO: 302
  source: /note="Description of Artificial Sequence: Synthetic polypeptide"

SEQ ID NO: 478 - DNA, 2214 bp, Artificial Sequence
  source: /note="Description of Artificial Sequence: Synthetic polynucleotide"
atggctgctgacggttatcttccagattggctcgaggacaacctctctgagggcattcgcgagtggtgggacctgaaacctggagccccgaaacccaaagccaaccagcagaagcaggacgacggccggggtctggtgcttcctggctacaagtacctcggacccttcaacggactcgacaagggggagcccgtcaacgcggcggacgcagcggccctcgagcacgacaaggcctacgaccagcagctcaaagcgggtgacaatccgtacctgcggtataaccacgccgacgccgagtttcaggagcgtctgcaagaagatacgtcttttgggggcaacctcgggcgagcagtcttccaggccaagaagcgggttctcgaacctctcggtctggttgaggaagctgctaagacggctcctggaaagaagagaccggtagaaccgtcacctcagcgttcccccgactcctccacgggcatcggcaagaaaggccagcagcccgctagaaagagactgaactttgggcagactggcgactcagagtcagtccccgaccctcaacctctcggagaaccaccagcaggcccctctggtctgggatctggtacaatggctgcaggcggtggcgctccaatggcagacaataacgaaggcgccgacggagtgggtaatgcctcaggaaattggcattgcgattccacatggctgggcgacagagtcatcaccaccagcacccgaacctgggctttgcccacctacaacaaccacctctacaagcaaatctccagtcagtcagcaggtagcaccaacgacaacgtctacttcggctacagcaccccctgggggtattttgacttcaacagattccactgtcacttctcaccacgtgactggcagcgactcatcaacaacaactggggattccggcccaagaagctcaacttcaagctcttcaacatccaagtcaaggaggtcacgacgaatgacggcgtcacgaccatcgctaataaccttaccagcacggttcaggtcttttcggactcggagtaccagctgccgtacgtcctcggctctgcccaccagggctgcctgcctccgttcccggcggacgtcttcatgattcctcagtacggctacctgactctgaacaatggcagccaatcggtgggacgttcatccttctactgcctggaatacttcccttctcaggtgctgagaacgggtaacaacttcaccttcagttacaccttcgaggacgtgcctttccacagcagctacgcgcacagccagagcctagaccggctgatgaatcccctcatcgaccagtacctgtattacctggctagaacacagagtaacccaggaggcacatctggcaatcgggaactgcagttttaccagggcgggccttccaccatggccgaacaagccaagaactggttacctggaccttgcttccggcaacaaagagtttccaaaacactggatcaaaacaacaacagcaactttgcttggactggtgccaccaaatatcacctgaacggcagaaactcattggtgaatcctggtgtcgccatggcaactcacaaggacgacgaggaccgctttttcccatccagcggagtcctgatttttggaaaaactggagcaaccaacaagactacattggaaaacgtgttaatgacaaatgaagaagaaattcgtcctactaatcctgtggccacagaagaatacgggatagtcagcagcaatttacaagcggccaatactgcagcccagacacaagttgtcaacaaccagggagccttacctggcatggtctggcagaaccgggacgtgtacctgcagggtcccatctgggccaaaattcctcacacagacggcaactttcacccgtctccgctgatgggcggctttggactgaagcatccgcctcctcagatcctgatcaaaaacactcctgttcctgctaatcccccggaggtgtttacgcctgccaagtttgcttctttcatcacacagtacagcaccggccaggtcagcgtggagatcgagtgggagctgcagaaggagaacagcaagcgctggaacccagagattcagtatacctccaattttgacaaacagactggtgtggactttgccgttgacagccagggtgtttattctgagcctcgccccattggtactcgttacctcacccgtaatctgtaa

SEQ ID NO: 479 - protein, 737 aa, Artificial Sequence
  source: /note="Description of Artificial Sequence: Synthetic polypeptide"
MAADGYLPDWLEDNLSEGIREWWDLKPGAPKPKANQQKQDDGRGLVLPGYKYLGPFNGLDKGEPVNAADAAALEHDKAYDQQLKAGDNPYLRYNHADAEFQERLQEDTSFGGNLGRAVFQAKKRVLEPLGLVEEAAKTAPGKKRPVEPSPQRSPDSSTGIGKKGQQPARKRLNFGQTGDSESVPDPQPLGEPPAGPSGLGSGTMAAGGGAPMADNNEGADGVGNASGNWHCDSTWLGDRVITTSTRTWALPTYNNHLYKQISSQSAGSTNDNVYFGYSTPWGYFDFNRFHCHFSPRDWQRLINNNWGFRPKKLNFKLFNIQVKEVTTNDGVTTIANNLTSTVQVFSDSEYQLPYVLGSAHQGCLPPFPADVFMIPQYGYLTLNNGSQSVGRSSFYCLEYFPSQVLRTGNNFTFSYTFEDVPFHSSYAHSQSLDRLMNPLIDQYLYYLARTQSNPGGTSGNRELQFYQGGPSTMAEQAKNWLPGPCFRQQRVSKTLDQNNNSNFAWTGATKYHLNGRNSLVNPGVAMATHKDDEDRFFPSSGVLIFGKTGATNKTTLENVLMTNEEEIRPTNPVATEEYGIVSSNLQAANTAAQTQVVNNQGALPGMVWQNRDVYLQGPIWAKIPHTDGNFHPSPLMGGFGLKHPPPQILIKNTPVPANPPEVFTPAKFASFITQYSTGQVSVEIEWELQKENSKRWNPEIQYTSNFDKQTGVDFAVDSQGVYSEPRPIGTRYLTRNL

SEQ ID NO: 480 - DNA, 2214 bp, Artificial Sequence
  source: /note="Description of Artificial Sequence: Synthetic polynucleotide"
atggctgccgatggttatcttccagattggctcgaggacaacctctctgagggcattcgcgagtggtgggacctgaaacctggagccccgaaacccaaagccaaccagcaaaagcaggacgacggccggggtctggtgcttcctggctacaagtacctcggacccttcaacggactcgacaagggggagcccgtcaacgcggcggacgcagcggccctcgagcacgacaaggcctacgaccagcagctcaaagcgggtgacaatccgtacctgcggtataatcacgccgacgccgagtttcaggagcgtctgcaagaagatacgtcttttgggggcaacctcgggcgagcagtcttccaggccaagaagcgggttctcgaacctctcggtctggttgaggaaggcgctaagacggctcctggaaagaagagaccggtagagccgtcaccacagcgttcccccgactcctccacgggcatcggcaagaaaggccagcagcccgccagaaagagactcaatttcggtcagactggcgactcagagtcagtccccgaccctcaacctatcggagaacctccagcagcgccctctagtgtgggatctggtacaatggctgcaggcggtggcgcaccaatggcagacaataacgaaggtgccgacggagtgggtagttcctcgggaaattggcattgcgattccacacggctgggcgacagagtcatcaccaccagcacccggacctgggctttgcccacctacaacaaccacctctacaagcaaatctccagtcagtcagcaggtagcaccaacgacaacgtctacttcggctacagcaccccctgggggtattttgacttcaacagattccactgtcacttctcaccacgtgactggcagcggctcatcaacaacaactggggattccggcccaagaagctcaacttcaagctgttcaacatccaggtcaaggaggtcacaacgaatgacggcgtcacgaccatcgccaataaccttaccagcacggttcaggtcttttcggactcggaataccagctgccctacgtcctcggctccgcacaccagggctgcctgcctccgttcccggcggacgtcttcatgattccccagtacggctacctgactctgaacaatggcagccaatcggtgggtcgttcctctttctactgcctggaatatttcccttctcaaatgctgagaacgggcaacaacttcaccttcagctacaccttcgaggacgttcccttccacagcagctacgcacacagccagagcctggaccggctgatgaatcctcttatcgaccagtacctgtattacctggccagaacacagagcaacgcaggaggcacagctggcaatcgggaactgcagttttatcagggcgggcctaccaccatggccgaacaagccaaaaactggctgcctggaccttgcttccggcaacgaagagtctccaagacgctggatcaaaacaacaacagcaactttgcttggactggtgccaccaaataccatctaaatggaagaaattcattggttaatcccggtgtcgccatggcaacccacaaggacgacgaggaacgcttcttcccttcgagcggagtcctgatttttggaaaaactggagcagctaataagactacactggaaaatgtgttaatgacaaatgaagaggaaattcgtcctaccaacccggtagccaccgaggaatacgggactgttagcagcaacctgcaggcggctaacactgcagcccagacacaagttgtcaacaaccagggagccttacctggtatggtctggcagaaccgggacgtgtacctgcagggtcccatctgggccaagattcctcacacggacggcaactttcacccgtctccgctgatgggcggctttggactgaagcatccgcctcctcagatcctgatcaaaaacactcctgttcctgctaatcccccggaggtgtttacgcctgccaagtttgcttctttcatcacacagtacagcaccggccaggtcagcgtggagatcgagtgggagctgcagaaggagaacagcaagcgctggaacccagagattcagtatacctccaattttgacaaacagactggtgtggactttgccgttgacagccagggtgtttattctgagcctcgccccattggtactcgttacctcacccgtaatctgtaa

SEQ ID NO: 481 - protein, 737 aa, Artificial Sequence
  source: /note="Description of Artificial Sequence: Synthetic polypeptide"
MAADGYLPDWLEDNLSEGIREWWDLKPGAPKPKANQQKQDDGRGLVLPGYKYLGPFNGLDKGEPVNAADAAALEHDKAYDQQLKAGDNPYLRYNHADAEFQERLQEDTSFGGNLGRAVFQAKKRVLEPLGLVEEGAKTAPGKKRPVEPSPQRSPDSSTGIGKKGQQPARKRLNFGQTGDSESVPDPQPIGEPPAAPSSVGSGTMAAGGGAPMADNNEGADGVGSSSGNWHCDSTRLGDRVITTSTRTWALPTYNNHLYKQISSQSAGSTNDNVYFGYSTPWGYFDFNRFHCHFSPRDWQRLINNNWGFRPKKLNFKLFNIQVKEVTTNDGVTTIANNLTSTVQVFSDSEYQLPYVLGSAHQGCLPPFPADVFMIPQYGYLTLNNGSQSVGRSSFYCLEYFPSQMLRTGNNFTFSYTFEDVPFHSSYAHSQSLDRLMNPLIDQYLYYLARTQSNAGGTAGNRELQFYQGGPTTMAEQAKNWLPGPCFRQRRVSKTLDQNNNSNFAWTGATKYHLNGRNSLVNPGVAMATHKDDEERFFPSSGVLIFGKTGAANKTTLENVLMTNEEEIRPTNPVATEEYGTVSSNLQAANTAAQTQVVNNQGALPGMVWQNRDVYLQGPIWAKIPHTDGNFHPSPLMGGFGLKHPPPQILIKNTPVPANPPEVFTPAKFASFITQYSTGQVSVEIEWELQKENSKRWNPEIQYTSNFDKQTGVDFAVDSQGVYSEPRPIGTRYLTRNL

SEQ ID NO: 482 - DNA, 2208 bp, Artificial Sequence
  source: /note="Description of Artificial Sequence: Synthetic polynucleotide"
atggctgccgatggttatcttccagattggctcgaggacactctctctgaaggaataagacagtggtggaagctcaaacctggcccaccaccaccaaagcccgcagagcggcataaggacgacagcaggggtcttgtgcttcctgggtacaagtacctcggacccttcaacggactcgacaagggggagccggtcaacgaggcagacgccgcggccctcgagcacgacaaggcctacgaccggcagctcgacagcggagacaacccgtacctcaagtacaaccacgccgacgcggagtttcaggagcgtcttaaagaagatacgtcttttgggggcaacctcggacgagcagtcttccaggcgaaaaagagggttcttgaacctctgggcctggttgaggaacctgttaagacggctccgggaaaaaagaggccggtagagcactctcctgcggagccagactcctcctcgggaaccggaaaagcgggccagcagcctgcaagaaaaagattgaattttggtcagactggagacgcagactccgtacctgacccccagcctctcggacagccaccagcagccccctctggtttgggatctactacaatggctacaggcagtggcgcaccaatggcagacaataacgagggtgccgatggagtgggtaattcttcaggaaattggcattgcgattcccaatggctgggcgacagagtcatcaccaccagcacccgaacctgggcccagcccacctacaacaaccacctctacaagcaaatctcaagccaatcaggagcctcaaacgacaaccactactttggctacagcaccccttgggggtattttgacttcaacagattccactgccacttttcaccacgtgactggcaaagactcatcaacaacaactggggattccgacccaagagactcaacttcaagctctttaacattcaagtcaaagaggtcacgcagaatgacggtacgacgacgattgccaataaccttaccagcacggttcaggtgtttactgactcggagtaccagctcccgtacgtcctcgggtcggcgcatcaaggatgcctcccgccgtttccagcggacgtcttcatggtcccacagtatggatacctcaccctgaacaacgggagtcaggcggtaggacgctcttccttttactgcctggagtactttccttctcagatgcttcgtactggaaacaactttcagttcagctacacctttgaagacgttcctttccacagcagctacgctcacagccagagtctggatcggctgatgaatcctctgatcgaccagtacctgtattatctgaacaaaacacaatcaaatagtggagctcttcagcagtctcggctactgtttagtcaagctggacccaccagcatgtctcttcaagctaaaaactggctacctggaccttgctacagacagcagcgtctgtcaaagcaggcaaacgacaacaacaacagcaactttccctggactgcggctacaaagtaccacctaaatggccgggactcgttggttaatccaggaccagctatggccagtcacaaagacgatgaagaaaagtttttccccatgcatggaaccctgatatttggtaaacaaggaacaaatgctaacgacgcggatttggacaatgtcatgattacagatgaagaagaaatccgcaccaccaatcccgtggctacggagcagtacggatatgtgtcaaataatttgcaaaactcaaatactggtccaactactggaactgtcaatcaccgaggagcgttacctggcatggtgtggcaggatcgagacgtgtacctgcagggacccatttgggccaagattcctcacaccgatggacactttcatccttctccactgatgggaggttttgggctcaaacacccgcctcctcagatcatgatcaaaaacactcccgttccagccaatcctcccacaaacttcagttctgccaagtttgcttctttcatcacacagtattccacggggcaggtcagcgtggagatcgagtgggagctgcagaaagagaacagcaaacgctggaatcccgaaattcagtacacttccaactacaacaaatctgttaatgtggactttactgtggacactaatggcgtgtattcagagcctcgccccattggcaccagatacctgactcgtaatctgtaa

SEQ ID NO: 483 - protein, 735 aa, Artificial Sequence
  source: /note="Description of Artificial Sequence: Synthetic polypeptide"
MAADGYLPDWLEDTLSEGIRQWWKLKPGPPPPKPAERHKDDSRGLVLPGYKYLGPFNGLDKGEPVNEADAAALEHDKAYDRQLDSGDNPYLKYNHADAEFQERLKEDTSFGGNLGRAVFQAKKRVLEPLGLVEEPVKTAPGKKRPVEHSPAEPDSSSGTGKAGQQPARKRLNFGQTGDADSVPDPQPLGQPPAAPSGLGSTTMATGSGAPMADNNEGADGVGNSSGNWHCDSQWLGDRVITTSTRTWAQPTYNNHLYKQISSQSGASNDNHYFGYSTPWGYFDFNRFHCHFSPRDWQRLINNNWGFRPKRLNFKLFNIQVKEVTQNDGTTTIANNLTSTVQVFTDSEYQLPYVLGSAHQGCLPPFPADVFMVPQYGYLTLNNGSQAVGRSSFYCLEYFPSQMLRTGNNFQFSYTFEDVPFHSSYAHSQSLDRLMNPLIDQYLYYLNKTQSNSGALQQSRLLFSQAGPTSMSLQAKNWLPGPCYRQQRLSKQANDNNNSNFPWTAATKYHLNGRDSLVNPGPAMASHKDDEEKFFPMHGTLIFGKQGTNANDADLDNVMITDEEEIRTTNPVATEQYGYVSNNLQNSNTGPTTGTVNHRGALPGMVWQDRDVYLQGPIWAKIPHTDGHFHPSPLMGGFGLKHPPPQIMIKNTPVPANPPTNFSSAKFASFITQYSTGQVSVEIEWELQKENSKRWNPEIQYTSNYNKSVNVDFTVDTNGVYSEPRPIGTRYLTRNL

SEQ ID NO: 484 - DNA, 2217 bp, Artificial Sequence
  source: /note="Description of Artificial Sequence: Synthetic polynucleotide"
atggctgccgatggttatcttccagattggctcgaggacaacctctctgagggcattcgcgagtggtgggcgctgaaacctggagccccgaagcccaaagccaaccagcaaaagcaggacgacggccggggtctggtgcttcctggctacaagtacctcggacccttcaacggactcgacaagggggagcccgtcaacgcggcggacgcagcggccctcgagcacgacaaggcctacgaccagcagctgcaggcgggtgacaatccgtacctgcggtataatcacgccgacgccgagtttcaggagcgtctgcaagaagatacgtcttttgggggcaacctcgggcgagcagtcttccaggccaagaagcgggttctcgaacctctcggtctggttgaggaaggcgctaagacggctcctggaaagaagagaccggtagagccgtcaccacagcgttcccccgactcctccacgggcatcggcaagaaaggccagcagcccgccagaaagagactcaatttcggtcagactggcgactcagagtcagtccccgaccctcaacctatcggagaacctccagcagcgccctctagtgtgggatctggtacaatggctgcaggcggtggcgcgccaatggcagacaataacgaaggtgccgacggagtgggtagttcctcgggaaattggcattgcgattccacatggctgggcgacagagtcatcaccaccagcacccgaacctgggccctgcccacctacaacaaccacctctacaagcaaacctccaacgggacctcgggaggcagcaccaacgacaacacctactttggctacagcaccccctgggggtattttgactttaacagattccactgccacttctcaccacgtgactggcagcgactcatcaacaacaactggggattccggcccaagagactcagcttcaagctcttcaacatccaggtcaaagaggtcacgcagaatgaaggcaccaagaccatcgccaataacctcaccagcaccatccaggtgtttacggactcggaataccagctgccgtacgtcctcggctctgcccaccagggctgcctgcctccgttcccggcggacgtcttcatgattcctcagtacggctacctgactctcaacaacggtagtcaggccgtgggacgttcctccttctactgcctggagtacttcccctctcagatgctgagaacgggcaacaacttttccttcagctacactttcgaggacgtgcctttccacagcagctacgcgcacagccagagtttggacaggctgatgaatcctctcatcgaccagtacctgtactacctgtcaagaacccagtctacgggaggcacagcgggaacccagcagttgctgttttctcaggccgggcctagcaacatgtcggctcaggccagaaactggctgcctggaccctgctacagacagcagcgcgtctccacgacactgtcgcaaaacaacaacagcaactttgcctggactggtgccaccaagtatcatctgaacggcagagactctctggtgaatccgggcgtcgccatggcaaccaacaaggacgacgaggaccgcttcttcccatccagcggcatcctcatgtttggcaagcagggagctggaaaagacaacgtggactatagcaacgtgatgctaaccagcgaggaagaaatcaagaccaccaaccccgtggccacagaacagtatggcgtggtggctgataacctacagcagcaaaacaccgctcctattgtgggggccgtcaacagccagggagccttacctggcatggtctggcagaaccgggacgtgtacctgcagggtcctatttgggccaagattcctcacacagatggcaactttcacccgtctcctttaatgggcggctttggacttaaacatccgcctcctcagatcctcatcaaaaacactcctgttcctgcggatcctccaacagcgttcaaccaggccaagctgaattctttcatcacgcagtacagcaccggacaagtcagcgcggagatcgagtgggagctgcagaaggagaacagcaagcgctggaacccagagattcagtatacttccaactactacaaatctacaaatgtggactttgctgttaatactgagggtgtttactctgagcctcgccccattggcactcgttacctcacccgtaatctgtaa

SEQ ID NO: 485 - protein, 738 aa, Artificial Sequence
  source: /note="Description of Artificial Sequence: Synthetic polypeptide"
MAADGYLPDWLEDNLSEGIREWWALKPGAPKPKANQQKQDDGRGLVLPGYKYLGPFNGLDKGEPVNAADAAALEHDKAYDQQLQAGDNPYLRYNHADAEFQERLQEDTSFGGNLGRAVFQAKKRVLEPLGLVEEGAKTAPGKKRPVEPSPQRSPDSSTGIGKKGQQPARKRLNFGQTGDSESVPDPQPIGEPPAAPSSVGSGTMAAGGGAPMADNNEGADGVGSSSGNWHCDSTWLGDRVITTSTRTWALPTYNNHLYKQTSNGTSGGSTNDNTYFGYSTPWGYFDFNRFHCHFSPRDWQRLINNNWGFRPKRLSFKLFNIQVKEVTQNEGTKTIANNLTSTIQVFTDSEYQLPYVLGSAHQGCLPPFPADVFMIPQYGYLTLNNGSQAVGRSSFYCLEYFPSQMLRTGNNFSFSYTFEDVPFHSSYAHSQSLDRLMNPLIDQYLYYLSRTQSTGGTAGTQQLLFSQAGPSNMSAQARNWLPGPCYRQQRVSTTLSQNNNSNFAWTGATKYHLNGRDSLVNPGVAMATNKDDEDRFFPSSGILMFGKQGAGKDNVDYSNVMLTSEEEIKTTNPVATEQYGVVADNLQQQNTAPIVGAVNSQGALPGMVWQNRDVYLQGPIWAKIPHTDGNFHPSPLMGGFGLKHPPPQILIKNTPVPADPPTAFNQAKLNSFITQYSTGQVSAEIEWELQKENSKRWNPEIQYTSNYYKSTNVDFAVNTEGVYSEPRPIGTRYLTRNL

SEQ ID NO: 486 - DNA, 2217 bp, Artificial Sequence
  source: /note="Description of Artificial Sequence: Synthetic polynucleotide"
atggctgctgacggttatcttccagattggctcgaggacaacctctctgagggcattcgcgagtggtgggacctgaaacctggagcccccaagcccaaggccaaccagcagaagcaggacgacggccggggtctggtgcttcctggctacaagtacctcggacccttcaacggactcgacaagggggagcccgtcaacgcggcggacgcagcggccctcgagcacgacaaggcctacgaccagcagctcaaagcgggtgacaatccgtacctgcggtataatcacgccgacgccgagtttcaggagcgtctgcaagaagatacgtcttttgggggcaacctcgggcgagcagtcttccaggccaagaagcgggttctcgaacctctcggtctggttgaggaagctgctaagacggctcctggaaagaagagaccggtagaaccgtcacctcagcgttcccccgactcctccacgggcatcggcaagaaaggccagcagcccgctagaaagagactgaactttgggcagactggcgactcagagtcagtccccgaccctcaaccaatcggagaacctccagcagcgccctctagtgtgggatctggtacaatggccgcaggcggtggcgcaccaatggcagacaataacgaaggtgccgacggagtgggtagttcctcgggaaattggcattgcgattccacatggctgggcgacagagtcatcaccaccagcacccgaacctgggccctgcccacctacaacaaccacctctacaagcaaatctccaacgggacctcgggaggcagcaccaacgacaacacctactttggctacagcaccccctgggggtattttgactttaacagattccactgccacttctcaccacgtgactggcagcgactcatcaacaacaactggggattccggcccaagagactcagcttcaagctcttcaacatccaggtcaaagaggtcacgcagaatgaaggcaccaagaccatcgccaataacctcaccagcaccatccaggtgtttacggactcggaataccagctgccgtacgtcctcggctctgcccaccagggctgcctgcctccgttcccggcggacgtcttcatgattcctcagtacggctacctgactctcaacaacggtagtcaggccgtgggacgttcctccttctactgcctggagtacttcccctctcagatgctgagaacgggcaacaacttttccttcagctacactttcgaggacgtgcctttccacagcagctacgcgcacagccagagtttggacaggctgatgaatcctctcatcgaccagtacctgtactacctgtcaagaacccagtctacgggaggcacagcgggaacccagcagctgctgttttctcaggccgggcctagcaacatgtcggctcaggccagaaactggctgcctggaccctgctacagacagcagcgcgtctccacgacactgtcgcaaaacaacaacagcaactttgcctggactggtgccaccaagtatcatctgaacggcagagactctctggtgaatccgggcgtcgccatggcaaccaacaaggacgacgaggaccgcttcttcccatccagcggcatcctcatgtttggcaagcagggagctggaaaagacaacgtggactatagcaacgtgatgctaaccagcgaggaagaaatcaagaccaccaaccccgtggccacagaacagtatggcgtggtggctgataacctacagcagcaaaacaccgctcctattgtgggggccgtcaacagccagggagccttacctggcatggtctggcagaaccgggacgtgtacctgcagggtcctatttgggccaagattcctcacacagatggcaactttcacccgtctcctttaatgggcggctttggacttaaacatccgcctcctcagatcctcatcaaaagcactcctgttcctgcggatcctccaacagcgttcaaccaggccaagctgaattctttcatcacgcagtacagcaccggacaagtcagcgtggagatcgagtgggagctgcagaaggagaacagcaagtgctggaacccagagattcagtatacttccaactactacaaatctacaaatgtggactttgctgttaatactgagggtgtttactctgagcctcgccccattggcactcgttacctcacccgtaatctgtaa

SEQ ID NO: 487 - protein, 738 aa, Artificial Sequence
  source: /note="Description of Artificial Sequence: Synthetic polypeptide"
MAADGYLPDWLEDNLSEGIREWWDLKPGAPKPKANQQKQDDGRGLVLPGYKYLGPFNGLDKGEPVNAADAAALEHDKAYDQQLKAGDNPYLRYNHADAEFQERLQEDTSFGGNLGRAVFQAKKRVLEPLGLVEEAAKTAPGKKRPVEPSPQRSPDSSTGIGKKGQQPARKRLNFGQTGDSESVPDPQPIGEPPAAPSSVGSGTMAAGGGAPMADNNEGADGVGSSSGNWHCDSTWLGDRVITTSTRTWALPTYNNHLYKQISNGTSGGSTNDNTYFGYSTPWGYFDFNRFHCHFSPRDWQRLINNNWGFRPKRLSFKLFNIQVKEVTQNEGTKTIANNLTSTIQVFTDSEYQLPYVLGSAHQGCLPPFPADVFMIPQYGYLTLNNGSQAVGRSSFYCLEYFPSQMLRTGNNFSFSYTFEDVPFHSSYAHSQSLDRLMNPLIDQYLYYLSRTQSTGGTAGTQQLLFSQAGPSNMSAQARNWLPGPCYRQQRVSTTLSQNNNSNFAWTGATKYHLNGRDSLVNPGVAMATNKDDEDRFFPSSGILMFGKQGAGKDNVDYSNVMLTSEEEIKTTNPVATEQYGVVADNLQQQNTAPIVGAVNSQGALPGMVWQNRDVYLQGPIWAKIPHTDGNFHPSPLMGGFGLKHPPPQILIKSTPVPADPPTAFNQAKLNSFITQYSTGQVSVEIEWELQKENSKCWNPEIQYTSNYYKSTNVDFAVNTEGVYSEPRPIGTRYLTRNL

SEQ ID NO: 488 - protein, 738 aa, Artificial Sequence
  source: /note="Description of Artificial Sequence: Synthetic polypeptide"
MAADGYLPDWLEDNLSEGIREWWDLKPGAPKPKANQQKQDDGRGLVLPGYKYLGPFNGLDKGEPVNAADAAALEHDKAYDQQLKAGDNPYLRYNHADAEFQERLQEDTSFGGNLGRAVFQAKKRVLEPLGLVEEAAKTAPGKKRPVEPSPQRSPDSSTGIGKKGQQPARKRLNFGQTGDSESVPDPQPIGEPPAAPSSVGSGTMAAGGGAPMADNNEGADGVGSSSGNWHCDSTWLGDRVITTSTRTWALPTYNNHLYKQISNGTSGGSTNDNTYFGYSTPWGYFDFNRFHCHFSPRDWQRLINNNWGFRPKRLSFKLFNIQVKEVTQNEGTKTIANNLTSTIQVFTDSEYQLPYVLGSAHQGCLPPFPADVFMIPQYGYLTLNNGSQAVGRSSFYCLEYFPSQMLRTGNNFSFSYTFEDVPFHSSYAHSQSLDRLMNPLIDQYLYYLSRTQSTGGTAGTQQLLFSQAGPSNMSAQARNWLPGPCYRQQRVSTTLSQNNNSNFAWTGATKYHLNGRDSLVNPGVAMATNKDDEDRFFPSSGILMFGKQGAGKDNVDYSNVMLTSEEEIKTTNPVATEQYGVVADNLQQQNTAPIVGAVNSQGALPGMVWQNRDVYLQGPIWAKIPHTDGNFHPSPLMGGFGLKHPPPQILIKSTPVPADPPTAFNQAKLNSFITQYSTGQVSVEIEWELQKENSKRWNPEIQYTSNYYKSTNVDFAVNTEGVYSEPRPIGTRYLTRNL

SEQ ID NO: 489 - DNA, 2217 bp, Artificial Sequence
  source: /note="Description of Artificial Sequence: Synthetic polynucleotide"
atggctgctgacggttatcttccagattggctcgaggacaacctctctgagggcattcgcgagtggtgggacctgaaacctggagcccccaagcccaaggccaaccagcagaagcaggacgacggccggggtctggtgcttcctggctacaagtacctcggacccttcaacggactcgacaagggggagcccgtcaacgcggcggacgcagcggccctcgagcacgacaaggcctacgaccagcagctcaaagcgggtgacaatccgtacctgcggtataaccacgccgacgccgagtttcaggagcgtctgcaagaagatacgtcttttgggggcaacctcgggcgagcagtcttccaggccaagaagcgggttctcgaacctctcggtctggttgaggaagctgctaagacggctcctggaaagaagagaccggtagaaccgtcacctcagcgttcccccgactcctccacgggcatcggcaagaaaggccagcagcccgctagaaagagactgaactttgggcagactggcgactcagagtcagtccccgaccctcaaccaatcggagaaccaccagcaggcccctctggtctgggatctggtacaatggctgcaggcggtggcgcaccaatggctgacaataacgagggcgccgacggagtgggtaatgcctcaggaaattggcattgcgattccacatggctgggcgacagagtcatcaccaccagcacccgaacctgggctttgcccacctacaacaaccacctctacaagcaaatctccagtcagtcagcaggtagcaccaacgacaacgtctacttcggctacagcaccccctgggggtattttgacttcaacagattccactgtcacttctcaccacgtgactggcagcggctcatcaacaacaactggggattccggcccaagaagctcaacttcaagctgttcaacatccaggtcaaggaggtcacaacgaatgacggcgtcacgaccatcgccaataaccctaccagcacggttcaggtcttttcggactcggaataccagctgccctacgtcctcggctccgcacaccagggctgcctgcctccgttcccggcggacgtcttcatgattccccagtacggctacctgactctgaacaatggcagccaatcggtgggtcgttcctctttctactgcctggaatatttcccttctcaaatgctgagaacgggcaacaacttcaccttcagctacaccttcgaggacgttcccttccacagcagctacgcacacagccagagcctggaccggctgatgaatcctcttatcgaccagtacctgtattacctggccagaacacagagcaacgcaggaggcacagctggcaatcgggaactgcagttttatcagggcgggcctaccaccatggccgaacaagccaaaaactggctgcctggaccctgctacagacagcagcgcgtctccacgacactgtcgcaaaacaacaacagcaactttgcctggactggtgccaccaagtatcatctgaacggcagagactctctggtgaatccgggcgtcgccatggcaaccaacaaggacgacgaggaccgcttcttcccatccagcggcatcctcatgtttggcaagcagggagctggaaaagacaacgtggactatagcaacgtgatgctaaccagcgaggaagaaatcaagaccaccaaccccgtggccacagaacagtatggcgtggtggctgataacctacagcagcaaaacaccgctcctattgtgggggccgtcaacagccagggagccttacctggcatggtctggcagaaccgggacgtgtacctgcagggtcctatttgggccaagattcctcacacagatggcaactttcacccgtctcctttaatgggcggctttggacttaaacatccgcctcctcagatcctcatcaaaaacactcctgttcctgcggatcctccaacagcgttcaaccaggccaagctgaattctttcatcacgcagtacagcaccggacaagtcagcgtggagatcgagtgggagctgcagaaggagaacagcaagcgctggaacccagagattcagtatacttccaactactacaaatctacaaatgtggactttgctgttaatactgagggtgtttactctgagcctcgccccattggcactcgttacctcacccgtaatctgtaa

SEQ ID NO: 490 - protein, 738 aa, Artificial Sequence
  source: /note="Description of Artificial Sequence: Synthetic polypeptide"
MAADGYLPDWLEDNLSEGIREWWDLKPGAPKPKANQQKQDDGRGLVLPGYKYLGPFNGLDKGEPVNAADAAALEHDKAYDQQLKAGDNPYLRYNHADAEFQERLQEDTSFGGNLGRAVFQAKKRVLEPLGLVEEAAKTAPGKKRPVEPSPQRSPDSSTGIGKKGQQPARKRLNFGQTGDSESVPDPQPIGEPPAGPSGLGSGTMAAGGGAPMADNNEGADGVGNASGNWHCDSTWLGDRVITTSTRTWALPTYNNHLYKQISSQSAGSTNDNVYFGYSTPWGYFDFNRFHCHFSPRDWQRLINNNWGFRPKKLNFKLFNIQVKEVTTNDGVTTIANNPTSTVQVFSDSEYQLPYVLGSAHQGCLPPFPADVFMIPQYGYLTLNNGSQSVGRSSFYCLEYFPSQMLRTGNNFTFSYTFEDVPFHSSYAHSQSLDRLMNPLIDQYLYYLARTQSNAGGTAGNRELQFYQGGPTTMAEQAKNWLPGPCYRQQRVSTTLSQNNNSNFAWTGATKYHLNGRDSLVNPGVAMATNKDDEDRFFPSSGILMFGKQGAGKDNVDYSNVMLTSEEEIKTTNPVATEQYGVVADNLQQQNTAPIVGAVNSQGALPGMVWQNRDVYLQGPIWAKIPHTDGNFHPSPLMGGFGLKHPPPQILIKNTPVPADPPTAFNQAKLNSFITQYSTGQVSVEIEWELQKENSKRWNPEIQYTSNYYKSTNVDFAVNTEGVYSEPRPIGTRYLTRNL

SEQ ID NO: 491 - DNA, 2208 bp, Artificial Sequence
  source: /note="Description of Artificial Sequence: Synthetic polynucleotide"
atggctgccgatggttatcttccagattggctcgaggacaacctctctgagggcattcacgagtggtgggacccgaaacctggagccccgaaacccaaagccaaccagcaaaagcaggacgacggccggggtctggtgcttcctggctacaagtacctcggacccttcaacggactcgacaagggggagcccgtcaacgcggcggacgcagcggccctcgagcacgacaaggcctacgaccagcagctcaaagcgggtgacaatccgtacctgcggtataatcacgccgacgccgagtttcaggagcgtctgcaagaagatacgtcttttgggggcaacctcgggcgagcagtcttccaggccaagaagcgggttctcgaacctctcggtctggttgaggaaggcgctaagacggctcctggaaagaagagaccggtagagccgtcaccacagcgttcccccgactcctccacgggcatcggcaagaaaggccagcagcccgccagaaagagactcaatttcggtcagactggcgactcagagtcagtccccgaccctcaacctatcggagaacctccagcagcgccctctagtgtgggatctggtacaatggctgcaggcggtggcgcaccaatggcagacaataacgaaggtgccgacggagtgggtagttcctcgggaaattggcattgcgattccacatggctgggcgacagagtcatcaccaccagcacccgaacctgggccctgcccacccacaacaaccacctctacaagcaaatctccaacgggacctcgggaggcagcaccaacgacaacgtctacttcggctacagcaccccctgggggtattttgacttcaacagattccactgtcacttctcaccacgtgaccggcagcgactcatcaacaacaactggggattccggcccaagagactcagcttcaagctcttcaacatccaggtcaaagaggtcacgcagaatgaaggcaccaagaccatcgccaataacctcaccagcaccatccaggtgtttacggactcggaataccagctgccgtacgtcctcggctctgcccaccagggctgcctgcctccgttcccggcggacgtcttcatgattcctcagtacggctacctgactctcaacaacggtagtcaggccgtgggacgttcctccttctactgcctggagtacttcccctctcagatgctgagaacgggcaacaacttttccttcagctacactttcgaggacgtgcctttccacagcagctacgcgcacagccagagtttggacaggctgatgaatcctctcatcgaccagtacctgtactacctgtcaagaacccagtctacggaaggcacagcgggaacccagcagttgctgttttctcaggccgggcctagcaacatgtcggctcaggccagaaactggctgcctggaccctgctacagacagcagcgcgtctccacgacactgtcgcaaaacaacaacagcaactttgcctggactggtgccaccaagtatcatctgaacggcagagactctctggtgaatccgggcgtcgccatggcaacccacaaggacgacgaggaacgcttcttcccttcgagcggagtcctgatttttggaaaaactggagcagctaataagactacactggaaaatgtgttaatgacaaatgaagaggaaattcgtcctaccaacccggtagccaccgaggaatacgggactgttagcagcaacctgcaggcggctaacactgcagcccagacacaagttgtcaacaaccagggagccttacctggtatggtctggcagaaccgggacgtgtacctgcagggtcccatctgggccaagattcctcacacggacggcaactttcacccgtctccgctgatgggcggctttggactgaagcatcctcagatcctgatcaaaaacactcctgttcctgctaatcccccggaggtgtttacgcctgccaagtttgcttctttcatcacacagtacagcaccggccaggtcagcgtggagatcgagtgggagctgcagaaggagaacagcaagcgctggaacccagagattcagtatacctccaattttgacaaacagactggtgtggactttgccgttgacagccagggtgtttattctgagcctcgccccattggtactcgttacctcacccgtaatctgtaa

SEQ ID NO: 492 - protein, 735 aa, Artificial Sequence
  source: /note="Description of Artificial Sequence: Synthetic polypeptide"
MAADGYLPDWLEDNLSEGIHEWWDPKPGAPKPKANQQKQDDGRGLVLPGYKYLGPFNGLDKGEPVNAADAAALEHDKAYDQQLKAGDNPYLRYNHADAEFQERLQEDTSFGGNLGRAVFQAKKRVLEPLGLVEEGAKTAPGKKRPVEPSPQRSPDSSTGIGKKGQQPARKRLNFGQTGDSESVPDPQPIGEPPAAPSSVGSGTMAAGGGAPMADNNEGADGVGSSSGNWHCDSTWLGDRVITTSTRTWALPTHNNHLYKQISNGTSGGSTNDNVYFGYSTPWGYFDFNRFHCHFSPRDRQRLINNNWGFRPKRLSFKLFNIQVKEVTQNEGTKTIANNLTSTIQVFTDSEYQLPYVLGSAHQGCLPPFPADVFMIPQYGYLTLNNGSQAVGRSSFYCLEYFPSQMLRTGNNFSFSYTFEDVPFHSSYAHSQSLDRLMNPLIDQYLYYLSRTQSTEGTAGTQQLLFSQAGPSNMSAQARNWLPGPCYRQQRVSTTLSQNNNSNFAWTGATKYHLNGRDSLVNPGVAMATHKDDEERFFPSSGVLIFGKTGAANKTTLENVLMTNEEEIRPTNPVATEEYGTVSSNLQAANTAAQTQVVNNQGALPGMVWQNRDVYLQGPIWAKIPHTDGNFHPSPLMGGFGLKHPQILIKNTPVPANPPEVFTPAKFASFITQYSTGQVSVEIEWELQKENSKRWNPEIQYTSNFDKQTGVDFAVDSQGVYSEPRPIGTRYLTRNL

SEQ ID NO: 493 - protein, 738 aa, Artificial Sequence
  source: /note="Description of Artificial Sequence: Synthetic polypeptide"
MAADGYLPDWLEDNLSEGIREWWDLKPGAPKPKANQQKQDDGRGLVLPGYKYLGPFNGLDKGEPVNAADAAALEHDKAYDQQLKAGDNPYLRYNHADAEFQERLQEDTSFGGNLGRAVFQAKKRVLEPLGLVEEGAKTAPGKKRPVEPSPQRSPDSSTGIGKKGQQPARKRLNFGQTGDSESVPDPQPIGEPPAAPSSVGSGTMAAGGGAPMADNNEGADGVGSSSGNWHCDSTWLGDRVITTSTRTWALPTYNNHLYKQISNGTSGGSTNDNTYFGYSTPWGYFDFNRFHCHFSPRDWQRPINNNWGFRPKRLSFKLFNIQVKEVTQNEGTKTIANNLTSTIQVFTDSEYQLPYVLGSAHQGCLPPFPADVFMIPQYGYLTLNNGSQAVGRSSFYCLEYFPSQMLRTGNNFSFSYPFEDVPFHSSYAHSQSLDRLMNPLIDQYLYYLSRTQSTGGTAGTQQLLFSQAGPSNMSAQARNWLPGPCYRQQRVSTTLSQNNNSNFAWTGATKYHLNGRDSLVNPGVAMATNKDDEDRFFPSSGILMFGKQGAGKDNVDYSNVMLTSEEEIKTTNPVATEQYGVVADNLQQQDTAPIVGAVNSQGALPGMVWQNRDVYLQGPIWAKIPHTDGNFHPSPLMGGFGLKHPPPQVLIKNTPVPADPPTAFNQAKLNSFITQYSTGQVSVEIEWELQKENSKRWNPEIQYTSNYYKSTNVDFAVNTEGVYSEPRPIGTRYLTRNL

SEQ ID NO: 494 - DNA, 2217 bp, Artificial Sequence
  source: /note="Description of Artificial Sequence: Synthetic polynucleotide"
atggctgccgatggttatcttccagattggctcgaggacaacctctctgagggcattcgcgagtggtgggacctgaaacctggagccccgaaacccaaggccaaccagcaaaagcaggacgacggccggggtctggtgcttcctggctacaagtacctcggacccttcaacggactcgacaagggggagcccgtcaacgcggcggacgcagcggccctcgagcacgacaaggcctacgaccagcagctcaaagcgggtgacaatccgtacctgcggtataatcacgccgacgccgagtttcaggagcgtctgcaagaagatacgtcttttgggggcaacctcgggcgagcagtcttccaggccaagaagcgggttctcgaacctctcggtctggttgaggaaggcgctaagacggctcctggaaagaagagaccggtagagccgtcaccacagcgttcccccgactcctccacgggcatcggcaagaaaggccagcagcccgccagaaagagactcaatttcggtcagactggcgactcagagtcagtccccgaccctcaacctatcggagaacctccagcagcgccctctagtgtgggatctggtacaatggctgcaggcggtggcgcaccaatggcagacaataacgaaggtgccgacggagtgggtagttcctcgggaaattggcattgcgattccacatggctgggcgacagagtcatcaccaccagcacccgaacctgggccctgcccacctacaacaaccacctctacaagcaaatctccaacgggacctcgggaggcagcaccaacgacaacacctactttggctacagcaccccctgggggtattttgactttaacagattccactgccacttctcaccacgtgactggcagcgacccatcaacaacaactggggattccggcccaagagactcagcttcaagctcttcaacatccaggtcaaagaggtcacgcagaatgaaggcaccaagaccatcgccaataacctcaccagcaccatccaggtgtttacggactcggaataccagctgccgtacgtcctcggctctgcccaccagggctgcctgcctccgttcccggcggacgtcttcatgattcctcagtacggctacctgactctcaacaacggtagtcaggccgtgggacgttcctccttctactgcctggagtacttcccctctcagatgctgagaacgggcaacaacttttccttcagctaccctttcgaggacgtgcctttccacagcagctacgcgcacagccagagtttggacaggctgatgaatcctctcatcgaccagtacctgtactacctgtcaagaacccagtctacgggaggcacagcgggaacccagcagttgctgttttctcaggccgggcctagcaacatgtcggctcaggccagaaactggctgcctggaccctgctacagacagcagcgcgtctccacgacactgtcgcaaaacaacaacagcaactttgcctggactggtgccaccaagtatcatctgaacggcagagactctctggtgaatccgggcgtcgccatggcaaccaacaaggacgacgaggaccgcttcttcccatccagcggcatcctcatgtttggcaagcagggagctggaaaagacaacgtggactatagcaacgtgatgctaaccagcgaggaagaaatcaagaccaccaaccccgtggccacagaacagtatggcgtggtggctgataacctacagcagcaagacaccgctcctattgtgggggccgtcaacagccagggagccttacctggcatggtctggcagaaccgggacgtgtacctgcagggtcctatttgggccaagattcctcacacagatggcaactttcacccgtctcctttaatgggcggctttggacttaaacatccgcctcctcaggtcctcatcaaaaacactcctgttcctgcggatcctccaacagcgttcaaccaggccaagctgaattctttcatcacgcagtacagcaccggacaagtcagcgtggagatcgagtgggagctgcagaaggagaacagcaagcgctggaacccagagattcagtatacttccaactactacaaatctacaaatgtggactttgctgttaatactgagggtgtttactctgagcctcgccccattggcactcgttacctcacccgtaatctgtaa

SEQ ID NO: 495 - DNA, 2214 bp, Artificial Sequence
  source: /note="Description of Artificial Sequence: Synthetic polynucleotide"
atggctgctgacggttatcttccagattggctcgaggacaacctctctgagggcattcgcgagtggtgggacctgaaacctggagcccccaagcccaaggccaaccagcagaagcaggacgacggccggggtctggtgcttcctggctacaagtacctcggacccttcaacggactcgacaagggggagcccgtcaacgcggcggacgcagcggccctcgagcacgacaaggcctacgaccagcagctcaaagcgggtgacaatccgtacctgcggtataaccacgccgacgccgagttccaggagcgtctgcaagaagatacgtcttttgggggcaacctcgggcgagcagtcttccaggccaagaagcgggttctcgaacctctcggtctggctgaggaagctgctaagacggctcctggaaagaagagaccggtagaaccgtcacctcagcgttcccccgactcctccacgggcatcggcaagaaaggccagcagcccgctagaaagagactgaactttgggcagactggcgactcagagtcagtccccgaccctcaaccaatcggagagccaccagcaggcccctctggtctgggatctggtacaatggctgcaggcggtggcgcaccaatggctgacaataacaagggcgccgacggagtgggtaatgcctcaggaaattggcattgcgattccacatggctgggcgacagagtcatcaccaccagcacccgaacctgggctttgcccacctacaacaaccacctctacaagcaaatctccagtcagtcagcaggtagcaccaacgacaacgtctacttcggctacagcaccccctgggggtattttgacttcaacagattccactgtcacttctcaccacgtgactggcagcggctcatcaacaacaactggggattccggcccaagaagctcaacttcaagctgttcaacatccaggtcaaggaggtcacaacgggtgacggcgtcacgaccatcgccaataaccttaccagcacggttcaggtcttttcggactcggaataccagctgccctacgtcctcggctccgcacaccagggctgcctgcctccgttcccggcggacgtcttcatgattccccagtacggctacctgactctgaacaatgacagccaatcggtgggtcgttcctctttctactgcctggaatatttcccttctcaaatgctgagaacgggcaacaacttcaccttcagctacaccttcgaggacgttcccttccacagcagctacgcacacagccagagcctggaccggctgatgaatcctcttatcgaccagtacctgtattacctggccagaacacagagcaacgcaggaggcacagctggcaatcgggaactgcagttttatcagggcgggcctaccaccatggccgaacaagccaaaaactggctgcctggaccttgcttccggcaacaaagagtctccaagacgctggatcaaaacaacaacagcaactttgcttggactggtgccaccaaataccatctaaatggaagaaattcattggttaatcccggtgtcgccatggcaacccacaaggacgacgaggaacgcttcttcccttcgagcggagtcctgatttttggaaaaactggagcagctaataagactacactggaaaatgtgttaatgacaaatgaagaggaaattcgtcctaccaacccggtagccaccgaggaatacgggactgttagcagcaacctgcaggcggctaacactgcagcccagacacaagttgtcaacaaccagggagccttacctggtatggtctggcagaaccgggacgtgtacctgcagggtcccatctgggccaagattcctcacacggacggcaactttcacccgtctccgctgatgggcggctttggactgaagcatccgcctcctcagatcctgatcaaaaacactcctgttcctgctaatcccccggaggtgtttacgcctgccaagtttgcttctttcatcacacagtacagcaccggccaggtcagcgtggagatcgagtgggagctgcagaaggagaacagcaagcgctggaacccagagattcagtatacctccaattttgacaaacagactggtgtggactttgccgttgacagccagggtgtttattctgagcctcgccccattggtactcgttacctcacccgtaatctgtaa

SEQ ID NO: 496 - protein, 737 aa, Artificial Sequence
  source: /note="Description of Artificial Sequence: Synthetic polypeptide"
MAADGYLPDWLEDNLSEGIREWWDLKPGAPKPKANQQKQDDGRGLVLPGYKYLGPFNGLDKGEPVNAADAAALEHDKAYDQQLKAGDNPYLRYNHADAEFQERLQEDTSFGGNLGRAVFQAKKRVLEPLGLAEEAAKTAPGKKRPVEPSPQRSPDSSTGIGKKGQQPARKRLNFGQTGDSESVPDPQPIGEPPAGPSGLGSGTMAAGGGAPMADNNKGADGVGNASGNWHCDSTWLGDRVITTSTRTWALPTYNNHLYKQISSQSAGSTNDNVYFGYSTPWGYFDFNRFHCHFSPRDWQRLINNNWGFRPKKLNFKLFNIQVKEVTTGDGVTTIANNLTSTVQVFSDSEYQLPYVLGSAHQGCLPPFPADVFMIPQYGYLTLNNDSQSVGRSSFYCLEYFPSQMLRTGNNFTFSYTFEDVPFHSSYAHSQSLDRLMNPLIDQYLYYLARTQSNAGGTAGNRELQFYQGGPTTMAEQAKNWLPGPCFRQQRVSKTLDQNNNSNFAWTGATKYHLNGRNSLVNPGVAMATHKDDEERFFPSSGVLIFGKTGAANKTTLENVLMTNEEEIRPTNPVATEEYGTVSSNLQAANTAAQTQVVNNQGALPGMVWQNRDVYLQGPIWAKIPHTDGNFHPSPLMGGFGLKHPPPQILIKNTPVPANPPEVFTPAKFASFITQYSTGQVSVEIEWELQKENSKRWNPEIQYTSNFDKQTGVDFAVDSQGVYSEPRPIGTRYLTRNL

SEQ ID NO: 497 - DNA, 2217 bp, Artificial Sequence
  source: /note="Description of Artificial Sequence: Synthetic polynucleotide"
atggctgccgatggttatcttccagattggctcgaggacaacctctctgagggcattcgcgagtggtgggacctgaaacctggagccccgaaacccaaagccaaccagcaaaagcaggacgacggccggggtctggtgcttcctggctacaagtacctcggacccttcaacggactcgacaagggggagcccgtcaacgcggcggacgcagcggccctcgagcacgacaaggcctacgaccagcagctcaaagcgggtgacaatccgtacctgcggtataatcacgccgacgccgagtttcaggagcgtctgcaagaagatacgtcttttgggggcaacctcgggcgagcagtcttccaggccaagaagcgggttctcgaacctctcggtctggttgaggaaggcgctaagacggctcctggaaagaagagaccggtagagccgtcaccacagcgttcccccgactcctccacgggcatcggcaagaaaggccagcagcccgccagaaagagactcaatttcggtcagactggcgactcagagtcagtccccgaccctcaacctatcggagaacctccagcagcgccctctagtgtgggatctggtacaatggctgcaggcggtggcgcaccaatggcagacaataacgaaggtgccgacggagtgggtagttcctcgggaaattggcattgcgattccacatggctgggcgacagagtcatcaccaccagcacccgaacctgggccctgcccacctacaacaaccacctctacaagcaaatctccaacgggacctcgggaggcagcaccaacgacaacacctactttggctacagcaccccctgggggtattttgactttaacagattccactgccacttctcaccacgtgactggcagcgactcatcaacaacaactggggattccggcccaagagactcagcttcaagctcttcaacatccaggtcaaagaggtcacgcagaatgaaggcaccaagaccatcgccaataacctcaccagcaccatccaggtgtttacggactcggaataccagctgccgtacgtcctcggctctgcccaccagggctgcctgcctccgttcccggcggacgtcttcatgattcctcagtacggctacctgactctcaacaacggtagtcaggccgtgggacgttcctccttctactgcctggagtacttcccctctcagatgctgagaacgggcaacaacttttccttcagctacactttcgaggacgtgcctttccacagcagctacgcgcacagccagagtttggacaggctgatgaatcctctcatcgaccagtacctgtactacctgtcaagaacccagtctacgggaggcacagcgggaacccagcagttgctgttttctcaggccgggcctagcaacatgtcggctcaggccagaaactggctgcctggaccctgctacagacagcagcgcgtctccacgacactgtcgcaaaacaacaacagcaactttgcctggactggtgccaccaagtatcatctgaacggcagagactctctggtgaatccgggcgtcgccatggcaaccaacaaggacgacgaggaccgcttcttcccatccagcggcatcctcatgtttggcaagcagggagctggaaaagacaacgtggactatagcaacgtgatgctaaccagcgaggaagaaatcaagaccaccaaccccgtggccacagaacagtatggcgtggtggctgataacctacagcagcaaaacaccgctcctattgtgggggccgtcaacagccagggagccttacctggcatggtctggcagaaccgggacgtgtacctgcagggtcctatttgggccaagattcctcacacagatggcaactttcacccgtctcctttaatgggcggctttggacttaaacatccgcctcctcagatcctcatcaaaaacactcctgttcctgcggatcctccaacagcgttcaaccaggccaagctgaattctttcatcacgcagtacagcaccggacaagtcagcgtggagatcgtgtgggagctgcagaaggagaacagcaagcgcaggaacccagagattcagtatacttccaactactacaaatctacaaatgtggactttgctgttaatactgagggtgtttactctgagcctcgccccattggcactcgttacctcacccgtaatctgtaa

SEQ ID NO: 498 - protein, 738 aa, Artificial Sequence
  source: /note="Description of Artificial Sequence: Synthetic polypeptide"
MAADGYLPDWLEDNLSEGIREWWDLKPGAPKPKANQQKQDDGRGLVLPGYKYLGPFNGLDKGEPVNAADAAALEHDKAYDQQLKAGDNPYLRYNHADAEFQERLQEDTSFGGNLGRAVFQAKKRVLEPLGLVEEGAKTAPGKKRPVEPSPQRSPDSSTGIGKKGQQPARKRLNFGQTGDSESVPDPQPIGEPPAAPSSVGSGTMAAGGGAPMADNNEGADGVGSSSGNWHCDSTWLGDRVITTSTRTWALPTYNNHLYKQISNGTSGGSTNDNTYFGYSTPWGYFDFNRFHCHFSPRDWQRLINNNWGFRPKRLSFKLFNIQVKEVTQNEGTKTIANNLTSTIQVFTDSEYQLPYVLGSAHQGCLPPFPADVFMIPQYGYLTLNNGSQAVGRSSFYCLEYFPSQMLRTGNNFSFSYTFEDVPFHSSYAHSQSLDRLMNPLIDQYLYYLSRTQSTGGTAGTQQLLFSQAGPSNMSAQARNWLPGPCYRQQRVSTTLSQNNNSNFAWTGATKYHLNGRDSLVNPGVAMATNKDDEDRFFPSSGILMFGKQGAGKDNVDYSNVMLTSEEEIKTTNPVATEQYGVVADNLQQQNTAPIVGAVNSQGALPGMVWQNRDVYLQGPIWAKIPHTDGNFHPSPLMGGFGLKHPPPQILIKNTPVPADPPTAFNQAKLNSFITQYSTGQVSVEIVWELQKENSKRRNPEIQYTSNYYKSTNVDFAVNTEGVYSEPRPIGTRYLTRNL

SEQ ID NO: 499 - protein, 738 aa, Artificial Sequence
  source: /note="Description of Artificial Sequence: Synthetic polypeptide"
MAADGYLPDWLEDNLSEGIREWWDLKPGAPKPKANQQKQDDGRGLVLPGYKYLGPFNGLDKGEPVNAADAAALEHDKAYDQQLKAGDNPYLRYNHADAEFQERLQEDTSFGGNLGRAVFQAKKRVLEPLGLVEEGAKTAPGKKRPVEPSPQRSPDSSTGIGKKGQQPARKRLNFGQTGDSESVPDPQPIGEPPAAPSSVGSGTMAAGGGAPMADNNEGADGVGSSSGNWHCDSTWLGDRVITTSTRTWALPTYNNHLYKQISNGTSGGSTNDNTYFGYSTPWGYFDFNRFHCHFSPRDWQRLINNNWGFRPKRLSFKLFNIQVKEVTQNEGTKTIANNLTSTIQVFTDSEYQLPYVLGSAHQGCLPPFPADVFMIPQYGYLTLNNGSQAVGRSSFYCLEYFPSQMLRTGNNFSFSYTFEDVPFHSSYAHSQSLDRLMNPLIDQYLYYLSRTQSTGGTAGTQQLLFSQAGPSNMSAQARNWLPGPCYRQQRVSTTLSQNNNSNFAWTGATKYHLNGRDSLVNPGVAMATNKDDEDRFFPSSGILMFGKQGAGKDNVDYSNVMLTSEEEIKTTNPVATEQYGVVADNLQQQNTAPIVGAVNSQGALPGMVWQNRDVYLQGPIWAKIPHTDGNFHPSPLMGGFGLKHPPPQILIKNTPVPADPPTAFNQAKLNSFITQYSTGQVSVEIEWELQKENSKRWNPEIQYTSNYYKSTNVDFAVNTEGVYSEPRPIGTRYLTRNL

SEQ ID NO: 500 - protein, 738 aa, Artificial Sequence
  source: /note="Description of Artificial Sequence: Synthetic polypeptide"
MAADGYLPDWLEDNLSEGIREWWDLKPGAPKPKANQQKQDDGRGLVLPGYKYLGPFNGLDKGEPVNAADAAALEHDKAYDQQLKAGDNPYLRYNHADAEFQERLQEDTSFGGNLGRAVFQAKKRVLEPLGLVEEGAKTAPGKKRPVEPSPQRSPDSSTGIGKKGQQPARKRLNFGQTGDSESVPDPQPIGEPPAAPSSVGSGTMAAGGGAPMADNNEGADGVGSSSGNWHCDSTWLGDRVITTSTRTWALPTYNNHLYKQISNGTSGGSTNDNTYFGYSTPWGYFDFNRFHCHFSPRDWQRLINNNWGFRPKRLSFKLFNIQVKEVTQNEGTKTIANNLTSTIQVFTDSEYQLPYVLGSAHQGCLPPFPADVFMIPQYGYLTLNNGSQAVGRSSFYCLEYFPSQMLRTGNNFSFSYTFEDVPFHSSYAHSQSLDRLMNPLIDQYLYYLSRTQSTGGTAGTQQLLFSQAGPSNMSAQARNWLPGPCYRQQRVSTTLSQNNNSNFAWTGATKYHLNGRDSLVNPGVAMATNKDDEDRFFPSSGILMFGKQGAGKDNVDYSNVMLTSEEEIKTTNPVATEQYGVVADNLQQQNTAPIVGAVNSQGALPGMVWQNRDVYLQGPIWAKIPHTDGNFHPSPLMGGFGLKHPPPQILIKNTPVPADPPTAFNQAKLNSFITQYSTGQVSVEIVWELQKENSKRWNPEIQYTSNYYKSTNVDFAVNTEGVYSEPRPIGTRYLTRNL

SEQ ID NO: 501 - protein, 738 aa, Artificial Sequence; identical to SEQ ID NO: 499
  source: /note="Description of Artificial Sequence: Synthetic polypeptide"

SEQ ID NO: 502 - DNA, 2214 bp, Artificial Sequence
  source: /note="Description of Artificial Sequence: Synthetic polynucleotide"
atggctgctgacggttatcttccagattggctcgaggacaacctctctgagggcattcgcgagtggtgggacctgaaacctggagcccccaagcccaaggccaaccagcagaagcaggacgacggccggggtctggtgcttcctggctacaagtacctcggacccttcaacggactcgacaagggggagcccgtcaacgcggcggacgcagcggccctcgagcacgacaaggcctacgaccagcagctcaaagcgggtgacaatccgtacctgcggtataaccacgccgacgccgagtttcaggagcgtctgcaagaagatacgtcttttgggggcaacctcgggcgagcagtcttccaggccaagaagcgggttctcgaacctctcggtctggttgaggaagctgctaagacggctcctggaaagaagagaccggtagaaccgtcacctcagcgttcccccgactcctccacgggcatcggcaagaaaggccagcagcccgctagaaagagactgaactttgggcagactggcgactcagagtcagtccccgaccctcaaccaatcggagaaccaccagcaggcccctctggtctgggatctggtacaatggctgcaggcggtggcgctccaatggcagacaataacgaaggcgccgacggagtgggtaatgcctcaggaaattggcattgcgattccacatggctgggcgacagagtcatcaccaccagcacccgaacctgggctttgcccacctacaacaaccacctctacaagcaaatctccagtcagtcagcaggtagcaccaacgacaacgtctacttcggctacagcaccccctgggggtattttgacttcaacagattccactgtcacttctcaccacgtgactggcagcggctcatcaacaacaactggggattccggcccaagaagctcaacttcaagctgttcaacatccaggtcaaggaggtcacaacgaatgacggcgtcacgaccatcgccaataaccttaccagcacggttcaggtcttttcggactcggaataccagctgccctacgtcctcggctccgcacaccagggctgcctgcctccgttcccggcggacgtcttcatgattccccagtacggctacctgactctgaacaatggcagccaatcggtgggtcgttcctctttctactgcctggaatatttcccttctcaaatgctgagaacgggcaacaacttcaccttcagctacaccttcgaggacgttcccttccacagcagctacgcacacagccagagcctggaccggctgatgaatcctcttatcgaccagtacctgtattacctggccagaacacagagcaacgcaggaggcacagctggcaatcgggaactgcagttttatcagggcgggcctaccaccatggccgaacaagccaaaaactggctgcctagaccttgcttccggcaacaaagagtctccaagacgctggatcaaaacaacaacagcaactttgcttggactggtgccaccaaataccatctaaatggaagaaattcattggttaatcccggtgtcgccatggcaacccacaaggacgacgaggaacgcttcttcccttcgagcggagtcctgatttttggaaaaactggagcagctaataagactacactggaaaatgtgttaatgacaaatgaagaggaaattcgtcctaccaacccggtagccaccgaggaatacgggactgttagcagcaacctgcaggcggctaacactgcagcccagacacaagttgtcaacaaccagggagccttacctggtatggtctggcagaaccgggacgtgtacctgcagggtcccatctgggccaagattcctcacacggacggcaactttcacccgtctccgctgatgggcggctttggactgaagcatccgcctcctcagatcctgatcaaaaacactcctgttcctgctaatcccccggaggtgtttacgcctgccaagtttgcttctttcatcacacagtacagcaccggccaggtcagcgtggagatcgagtgggagctgcagaaggagaacagcaagcgctggaacccagagattcagtatacctccaattttgacaaacagactggtgtggactttgccgttgacagccagggtgtttattctgagcctcgccccattggtactcgttacctcacccgtaatctgtaa

SEQ ID NO: 503 - protein, 737 aa, Artificial Sequence
  source: /note="Description of Artificial Sequence: Synthetic polypeptide"
MAADGYLPDWLEDNLSEGIREWWDLKPGAPKPKANQQKQDDGRGLVLPGYKYLGPFNGLDKGEPVNAADAAALEHDKAYDQQLKAGDNPYLRYNHADAEFQERLQEDTSFGGNLGRAVFQAKKRVLEPLGLVEEAAKTAPGKKRPVEPSPQRSPDSSTGIGKKGQQPARKRLNFGQTGDSESVPDPQPIGEPPAGPSGLGSGTMAAGGGAPMADNNEGADGVGNASGNWHCDSTWLGDRVITTSTRTWALPTYNNHLYKQISSQSAGSTNDNVYFGYSTPWGYFDFNRFHCHFSPRDWQRLINNNWGFRPKKLNFKLFNIQVKEVTTNDGVTTIANNLTSTVQVFSDSEYQLPYVLGSAHQGCLPPFPADVFMIPQYGYLTLNNGSQSVGRSSFYCLEYFPSQMLRTGNNFTFSYTFEDVPFHSSYAHSQSLDRLMNPLIDQYLYYLARTQSNAGGTAGNRELQFYQGGPTTMAEQAKNWLPRPCFRQQRVSKTLDQNNNSNFAWTGATKYHLNGRNSLVNPGVAMATHKDDEERFFPSSGVLIFGKTGAANKTTLENVLMTNEEEIRPTNPVATEEYGTVSSNLQAANTAAQTQVVNNQGALPGMVWQNRDVYLQGPIWAKIPHTDGNFHPSPLMGGFGLKHPPPQILIKNTPVPANPPEVFTPAKFASFITQYSTGQVSVEIEWELQKENSKRWNPEIQYTSNFDKQTGVDFAVDSQGVYSEPRPIGTRYLTRNL

SEQ ID NO: 504 - DNA, 2214 bp, Artificial Sequence
  source: /note="Description of Artificial Sequence: Synthetic polynucleotide"
atggctgctgacggttatcttccagattggctcgaggacaacctctctgagggcattcgcgagtggtgggacctgaaacctggagcccccaagcccaaggccaaccagcagaagcaggacgacggccggggtctggtgcttcctggctacaagtacctcggacccttcaacggactcgacaagggggagcccgtcaacgcggcggacgcagcggccctcgagcacgacaaggcctacgaccagcagctcaaagcgggtgacaatccgtacctgcggtataaccatgccgacgccgagtttcaggagcgtctgcaagaagatacgtcttttgggggcaacctcgggcgagcagtcctccaggccaagaagcgggttctcgaacctctcggtctggttgaggaagctgctaagacggctcctggaaagaagagaccggtagaaccgtcacctcagcgttcccccgactcctccacgggcatcggcaagaaaggccagcagcccgctagaaagagactgaactttgggcagactggcgactcagagtcagtccccgaccctcaaccaatcggagaaccaccagcaggcccctctggtctgggatctggtacaatggctgcaggcggtggcgctccaatggcagacaataacgaaggcgccgacggagtgggtaatgcctcaggaaattggcattgcgattccacatggctgggcgacagagtcatcaccaccagcacccgaacctgggctttgcccacctacaacaaccacctctacaagcaaatctccagtcagtcagcaggtagcaccaacgacaacgtctacttcggctacagcaccccctgggggtattttgacttcaacagattccactgtcacttctcaccacgtgactggcagcggctcatcaacaacaactggggattccggcccaagaagctcaacttcaagctgttcaacatccaggtcaaggaggtcacaacgaatgacggcgtcacgaccatcgccaataaccttaccagcacggttcaggtcttttcggactcggaataccagctgccctacgtcctcggctccgcacaccagggctgcctgcctccgttcccggcggacgtcttcatgattccccagtacggctacctgactctgaacaatggcagccaatcggtgggtcgttcctctttctactgcctggaatatttcccttctcaaatgctgagaacgggcaacaacttcaccttcagctacaccttcgaggacgttcccttccacagcagctacgcacacagccagagcctggaccggctgatgaatcctcttatcgaccagtacctgtattacctggccagaacacagagcaacgcaggaggcacagctggcaatcgggaactgcagttttatcagggcgggcctaccaccatggccgaacaagccaaaaactggctgcctggaccttgcttccggcaacaaagagtctccaagacgctggatcaaaacaacaacagcaactttgcttggactggtgccaccaaataccatctaaatggaagaaattcattggttaatcccggtgtcgccatggcaacccacaaggacgacgaggaacgcttcttcccttcgagcggagtcctgatttttggaaaaactggagcagctaataagactacactggaaaatgtgttaatgacaaatgaagaggaaattcgtcctaccaacccggtagccaccgaggaatacgggactgttagcagcaacctgcaggcggctaacactgcagcccagacacaagttgtcaacaaccagggagccttacctggtatggtctggcagaaccgggacgtgtacctgcagggtcccatctgggccaagattcctcacacggacggcaactttcacccgtctccgctgatgggcggctttggactgaagcatccgcctcctcagatcctgatcaaaaacactcctgttcctgctaatcccccggaggtgtttacgcctgccaagtttgcttctttcatcacacagtacagcaccggccaggtcagcgtggagatcgagtgggagctgcagaaggagaacagcaagcgctggaacccagagattcagtatacctccaattttgacaaacagactggtgtggactttgccgttgacagccagggtgtttattctgagcctcgccccattggtactcgttacctcacccgtaatctgtaa

SEQ ID NO: 505 - protein, 737 aa, Artificial Sequence; identical to SEQ ID NO: 464
  source: /note="Description of Artificial Sequence: Synthetic polypeptide"

SEQ ID NO: 506 - protein, 737 aa, Artificial Sequence
  source: /note="Description of Artificial Sequence: Synthetic polypeptide"
MAADGYLPDWLEDNLSEGIREWWDLKPGAPKPKANQQKQDDGRGLVLPGYKYLGPFNGLDKGEPVNAADAAALEHDKAYDQQLKAGDNPYLRYNHADAEFQERLQEDTSFGGNLGRAVLQAKKRVLEPLGLVEEAAKTAPGKKRPVEPSPQRSPDSSTGIGKKGQQPARKRLNFGQTGDSESVPDPQPIGEPPAGPSGLGSGTMAAGGGAPMADNNEGADGVGNASGNWHCDSTWLGDRVITTSTRTWALPTYNNHLYKQISSQSAGSTNDNVYFGYSTPWGYFDFNRFHCHFSPRDWQRLINNNWGFRPKKLNFKLFNIQVKEVTTNDGVTTIANNLTSTVQVFSDSEYQLPYVLGSAHQGCLPPFPADVFMIPQYGYLTLNNGSQSVGRSSFYCLEYFPSQMLRTGNNFTFSYTFEDVPFHSSYAHSQSLDRLMNPLIDQYLYYLARTQSNAGGTAGNRELQFYQGGPTTMAEQAKNWLPGPCFRQQRVSKTLDQNNNSNFAWTGATKYHLNGRNSLVNPGVAMATHKDDEERFFPSSGVLIFGKTGAANKTTLENVLMTNEEEIRPTNPVATEEYGTVSSNLQAANTAAQTQVVNNQGALPGMVWQNRDVYLQGPIWAKIPHTDGNFHPSPLMGGFGLKHPPPQILIKNTPVPANPPEVFTPAKFASFITQYSTGQVSVEIEWELQKENSKRWNPEIQYTSNFDKQTGVDFAVDSQGVYSEPRPIGTRYLTRNL

SEQ ID NO: 507 - DNA, 2217 bp, Artificial Sequence
  source: /note="Description of Artificial Sequence: Synthetic polynucleotide"
atggctgccgatggttatcttccagattggctcgaggacaacctctctgagggcattcgcgagtggtgggacctgaaacctggagccccgaaacccaaagccaaccagcaaaagcaggacgacggccggggtctggtgcttcctggctacaagtacctcggacccttcaacggactcgacaagggggagcccgtcaacgcggcggacgcagcggccctcgagcacgacaaggcctacgaccagcagctcaaagcgggtgacaatccgtacctgcggtataatcacgccgacgccgagtttcaggagcgtctgcaagaagatacgtcttttgggggcaacctcgggcgagcagtcttccaggccaagaagcgggttctcgaacctctcggtctggttgaggaaggcgctaagacggctcctggaaagaagagaccggtagagccgtcaccacagcgttcccccgactcctccacgggcatcggcaagaaaggccagcagcccgccagaaagagactcaatttcggtcagactggcgactcagagtcagtccccgaccctcaacctatcggagaacctccagcagcgccctctagtgtgggatctggtacaatggctgcaggcggtggcgcaccaatggcagacaataacgaaggtgccgacggagtgggtagttcctcgggaaattggcattgcgattccacatggctgggcgacagagtcatcaccaccagcacccgaacctgggccctgcccacctacaacaaccacctctacaagcaaatctccaacgggacctcgggaggcagcaccaacgacaacacctactttggctacagcaccccctgggggtattttgactttaacagattccactgccacttctcaccacgtgactggcagcgactcatcaacaacaactggggattccggcccaagagactcagcttcaagctcttcaacatccaggtcaaagaggtcacgcagaatgaaggcaccaagaccatcgccaataacctcaccagcaccatccaggtgtttacggactcggaataccagctgccgtacgtcctcggctctgcccaccagggctgcctgcctccgttcccggcggacgtcttcatgattcctcagtacggctacctgactctcaacaacggtagtcaggccgtgggacgttcctccttctactgcctggagtacttcccctctcagatgctgagaacgggcaacaacttttccttcagctacactttcgaggacgtgcctttccacagcagctacgcgcacagccagagtttggacaggctgatgaatcctctcatcgaccagtacctgtactacctgtcaagaacccagtctacgggaggcacagcgggaacccagcagttgctgttttctcaggccgggcctagcaacatgtcggctcaggccagaaactggctgcctggaccctgctacagacagcagcgcgtctccacgacactgtcgcaaaacaacaacagcaactttgcctggactggtgccaccaagtatcatctgaacggcagagactctctggtgaatccgggcgtcgccatggcaaccaacaaggacgacgaggaccgcttcttcccacccagcggcatcctcatgtttggcaagcagggagctggaaaagacaacgtggactatagcaacgtgatgctaaccagcgaggaagaaatcaagaccaccaaccccgtggccacagaacagtatggcgtggtggctgataacctacagcagcaaaacaccgctcctattgtgggggccgtcaacagccagggagccttacctggcatggtctggcagaaccgggacgtgtacctgcagggtcctatttgggccaagattcctcacacagatggcaactttcacccgtctcctttaatgggcggctttggacttaaacatccgcctcctcagatcctcatcaaaaacactcctgttcctgcggatcctccaacagcgttcaaccaggccaagctgaattctttcatcacgcagtacagcaccggacaagtcagcgtggtgatcgagtgggagctgcagaaggagaacagcaagcgctggaacccagagattcagtatacttccaactactacaaatctacaaatgtggactttgctgttaatactgagggtgtttactctgagcttcgccccattggcactcgttacctcacccgtaatctgtaa

SEQ ID NO: 508 - protein, 738 aa, Artificial Sequence
  source: /note="Description of Artificial Sequence: Synthetic polypeptide"
MAADGYLPDWLEDNLSEGIREWWDLKPGAPKPKANQQKQDDGRGLVLPGYKYLGPFNGLDKGEPVNAADAAALEHDKAYDQQLKAGDNPYLRYNHADAEFQERLQEDTSFGGNLGRAVFQAKKRVLEPLGLVEEGAKTAPGKKRPVEPSPQRSPDSSTGIGKKGQQPARKRLNFGQTGDSESVPDPQPIGEPPAAPSSVGSGTMAAGGGAPMADNNEGADGVGSSSGNWHCDSTWLGDRVITTSTRTWALPTYNNHLYKQISNGTSGGSTNDNTYFGYSTPWGYFDFNRFHCHFSPRDWQRLINNNWGFRPKRLSFKLFNIQVKEVTQNEGTKTIANNLTSTIQVFTDSEYQLPYVLGSAHQGCLPPFPADVFMIPQYGYLTLNNGSQAVGRSSFYCLEYFPSQMLRTGNNFSFSYTFEDVPFHSSYAHSQSLDRLMNPLIDQYLYYLSRTQSTGGTAGTQQLLFSQAGPSNMSAQARNWLPGPCYRQQRVSTTLSQNNNSNFAWTGATKYHLNGRDSLVNPGVAMATNKDDEDRFFPPSGILMFGKQGAGKDNVDYSNVMLTSEEEIKTTNPVATEQYGVVADNLQQQNTAPIVGAVNSQGALPGMVWQNRDVYLQGPIWAKIPHTDGNFHPSPLMGGFGLKHPPPQILIKNTPVPADPPTAFNQAKLNSFITQYSTGQVSVVIEWELQKENSKRWNPEIQYTSNYYKSTNVDFAVNTEGVYSELRPIGTRYLTRNL

SEQ ID NO: 509 - DNA, 2214 bp, Artificial Sequence
  source: /note="Description of Artificial Sequence: Synthetic polynucleotide"
atggctgctgacggttatcttccagattggctcgaggacaacctctctgagggcattcgcgagtggtgggacctgaaacctggagcccccaagcccaaggccaaccagcagaagcaggacgacggccggggtctggtgcttcctggctacaagtacctcggacccttcaacggactcgacaagggggagcccgtcaacgcggcggacgcagcggccctcgagcacgacaaggcctacgaccagcagctcaaagcgggtgacaatccgtacctgcggtataaccacgccgacgccgagtttcaggagcgtctgcaagaagatacgtcttttgggggcaacctcgggcgagcagtcttccaggccaagaagcgggttctcgaacctctcggtctggttgaggaagctgctaagacggctcctggaaagaagagaccggtagaaccgtcacctcagcgttcccccgactcctccacgggcatcggcaagaaaggccagcagcccgctagaaagagactgaactttgggcagactggcgactcagagtcagtccccgaccctcaaccaatcggagaaccaccagcaggcccctctggtctgggatctggtacaatggctgcaggcggtggcgccccaatggcagacaataacgaaggcgccgacggagtgggtaatgcctcaggaaattggcattgcgattccacatggctgggcgacagagtcatcaccaccagcacccgaacctgggctttgcccacctacaacaaccacctctacaagcaaatctccagtcagtcagcaggtagcaccaacgacaacgtctacttcggctacagcaccccctgggggtattttgacttcaacagattccactgtcacttctcaccacgtgactggcagcggctcatcaacaacaactggggattccggcccaagaagctcaacttcaagctgttcaacatccaggtcaaggaggtcacaacgaatgacggcgtcacgaccatcgccaataaccttaccagcacggttcaggtcttttcggactcggaataccagctgccctacgtcctcggctccgcacaccagggctgcctgcctccgttcccggcggacgtcttcatgattccccagtacggctacctgactctgaacaatggcagccaatcggtgggtcgttcctctttctactgcctggaatatttcccttctcaaatgctgagaacgggcaacaacttcaccatcagctacaccttcgaggacgttcccttccacagcagctacgcacacagccagagcctggaccggctgatgaatcctcttatcgaccagtacctgtattacctggccagaacacagagcaacgcaggaggcacagctggcaatcaggaactgcagttttatcagggcgggcctaccaccatggccgaacaagccaaaaactggctgcctggaccttgcttccggcaacaaagagtctccaagacgctggatcaaaacaacaacagcaactttgcttggactggtgccaccaaataccatctaaatggaagaaattcattggttaatcccggtgtcgccatggcaacccacaaggacgacgaggaacgcttcttcccttcgagcggagtcctgatttttggaaaaactggagcagctaataagactacactggaaaatgtgttaatgacaaatgaagaggaaattcgtcctaccaacccggtagccaccgaggaatacgggactgttagcagcaacctgcaggcggctaacactgcagcccagacacaagttgtcaacaaccagggagccttacctggtatggtctggcagaaccgggacgtgtacctgcagggtcccatctgggccaagattcctcacacagatggcaactttcacccgtctcctttaatgggcggctttggacttaaacatccgcctcctcagatcctcatcaaaaacactcctgttcctgcggatcctccaacagcgttcaaccaggccaagctgaattctttcatcacgcagtacagcaccggacaagtcagcgtggagatcgagtgggagctgcagaaggagaacagcaagcgctggaacccagagattcagtatacttccaactactacaaatctacaaatgtggactttgctgttaatactgagggtgtttactctgagcctcgccccattggcactcgttacctcacccgtaatctgtaa

SEQ ID NO: 510 - protein, 737 aa, Artificial Sequence
  source: /note="Description of Artificial Sequence: Synthetic polypeptide"
MAADGYLPDWLEDNLSEGIREWWDLKPGAPKPKANQQKQDDGRGLVLPGYKYLGPFNGLDKGEPVNAADAAALEHDKAYDQQLKAGDNPYLRYNHADAEFQERLQEDTSFGGNLGRAVFQAKKRVLEPLGLVEEAAKTAPGKKRPVEPSPQRSPDSSTGIGKKGQQPARKRLNFGQTGDSESVPDPQPIGEPPAGPSGLGSGTMAAGGGAPMADNNEGADGVGNASGNWHCDSTWLGDRVITTSTRTWALPTYNNHLYKQISSQSAGSTNDNVYFGYSTPWGYFDFNRFHCHFSPRDWQRLINNNWGFRPKKLNFKLFNIQVKEVTTNDGVTTIANNLTSTVQVFSDSEYQLPYVLGSAHQGCLPPFPADVFMIPQYGYLTLNNGSQSVGRSSFYCLEYFPSQMLRTGNNFTISYTFEDVPFHSSYAHSQSLDRLMNPLIDQYLYYLARTQSNAGGTAGNQELQFYQGGPTTMAEQAKNWLPGPCFRQQRVSKTLDQNNNSNFAWTGATKYHLNGRNSLVNPGVAMATHKDDEERFFPSSGVLIFGKTGAANKTTLENVLMTNEEEIRPTNPVATEEYGTVSSNLQAANTAAQTQVVNNQGALPGMVWQNRDVYLQGPIWAKIPHTDGNFHPSPLMGGFGLKHPPPQILIKNTPVPADPPTAFNQAKLNSFITQYSTGQVSVEIEWELQKENSKRWNPEIQYTSNYYKSTNVDFAVNTEGVYSEPRPIGTRYLTRNL

SEQ ID NO: 511 - DNA, 2217 bp, Artificial Sequence
  source: /note="Description of Artificial Sequence: Synthetic polynucleotide"
atggctgccgatggttatcttccagattggctcgaggacaacctctctgagggcattcgcgagtggtgggacctgaaacctggagccccgaaacccaaagccaaccagcaaaagcaggacgacggccggggtctggtgcttcctggctacaagtacctcggacccttcaacggactcgacaagggggagcccgtcaacgcggcggacgcagcggccctcgagcacgacaaggcctacgaccagcagctcaaagcgggtgacaatccgtacctgcggtataatcacgccgacgccgagtttcaggagcgtctgcaagaagatacgtcttttgggggcaacctcgggcgagcagtcttccaggccaagaagcgggttctcgaacctctcggtctggttgaggaaggcgctaagacggctcctggaaagaagagaccggtagagccgtcaccacagcgttcccccgactcctccacgggcatcggcaagaaaggccagcagcccgccagaaagagactcaatttcggtcagactggcgactcagagtcagtccccgaccctcaacctatcggagaacctccagcagcgccctctagtgtgggatctggtacaatggctgcaggcggtggcgcaccaatggcagacaataacgaaggtgccgacggagtgggtagttcctcgggaaattggcattgcgattccacatggctgggcgacagagtcatcaccaccagcacccgaacctgggccctgcccgcctacaacaaccacctctacaagcaaatctccaacgggacctcgggaggcagcaccaacgacaacacctactttggctacagcaccccctgggggtattttgactttaacagattccactgccacttctcaccacgtgactggcagcgactcatcaacaacaactggggattccggcccaagagactcagcttcaagctcttcaacatccaggtcaaagaggtcacgcagaatgaaggcaccaagaccatcgccaataacctcaccagcaccatccaggtgtttacggactcggaataccagctgccgtacgtcctcggctctgcccaccagggctgcctgcctccgttcccggcggatgtcttcatgattcctcagtacggctacctgactctcaacaacggtagtcaggccgtgggacgttcctccttctactgcctggagtacttcccctctcagatgctgagaacgggcaacaacttttccttcagctacactttcgaggacgtgcctttccacagcagctacgcgcacagccagagtttggacaggctgatgaatcctctcatcgaccagtacctgtactacctgtcaagaacccagtctacgggaggcacagcgggaacccagcagttgctgttttctcaggccgggcctagcaacatgtcggctcaggccagaaactggctgcctggaccctgctacagacagcagcgcgtctccacgacactgtcgcaaaacaacaacagcaactttgcctggactggtgccaccaagtatcatctgagcggcagagactctctggtgaatccgggcgtcgccatggcaaccaacaaggacgacgaggaccgcttcttcccatccagcggcatcctcatgtttggcaagcagggagctggaaaagacaacgtggactatagcaacgtgatgctaaccagcgaggaagaaatcaagaccaccaaccccgtggccacagaacagtatggcgtggtggctgataacctacagcagcaaaacaccgctcctattgtgggggccgtcaacagccagggagccttacctggcatggtctggcagaaccgggacgtgtacctgcagggtcctatttgggccaagattcctcacacagatggcaactttcacccgtctcctttaatgggcggctttggacttaaacatccgcctcctcagatcctcatcaaaaacactcctgttcctgcggatcctccaacagcgttcaaccaggccaagctgaattcttccatcacgcagtacagcaccggacaagtcagcgtggagatcgagtgggagctgcagaaggagaacagcaagcgctggaacccagagattcagtatacttccaactactacaaatctacaaatgtggactttgctgttaatactgagggtgtttactctgagcctcgccccattggcactcgttacctcacccgtaatttgtaa

SEQ ID NO: 512 - protein, 738 aa, Artificial Sequence
  source: /note="Description of Artificial Sequence: Synthetic polypeptide"
MAADGYLPDWLEDNLSEGIREWWDLKPGAPKPKANQQKQDDGRGLVLPGYKYLGPFNGLDKGEPVNAADAAALEHDKAYDQQLKAGDNPYLRYNHADAEFQERLQEDTSFGGNLGRAVFQAKKRVLEPLGLVEEGAKTAPGKKRPVEPSPQRSPDSSTGIGKKGQQPARKRLNFGQTGDSESVPDPQPIGEPPAAPSSVGSGTMAAGGGAPMADNNEGADGVGSSSGNWHCDSTWLGDRVITTSTRTWALPAYNNHLYKQISNGTSGGSTNDNTYFGYSTPWGYFDFNRFHCHFSPRDWQRLINNNWGFRPKRLSFKLFNIQVKEVTQNEGTKTIANNLTSTIQVFTDSEYQLPYVLGSAHQGCLPPFPADVFMIPQYGYLTLNNGSQAVGRSSFYCLEYFPSQMLRTGNNFSFSYTFEDVPFHSSYAHSQSLDRLMNPLIDQYLYYLSRTQSTGGTAGTQQLLFSQAGPSNMSAQARNWLPGPCYRQQRVSTTLSQNNNSNFAWTGATKYHLSGRDSLVNPGVAMATNKDDEDRFFPSSGILMFGKQGAGKDNVDYSNVMLTSEEEIKTTNPVATEQYGVVADNLQQQNTAPIVGAVNSQGALPGMVWQNRDVYLQGPIWAKIPHTDGNFHPSPLMGGFGLKHPPPQILIKNTPVPADPPTAFNQAKLNSSITQYSTGQVSVEIEWELQKENSKRWNPEIQYTSNYYKSTNVDFAVNTEGVYSEPRPIGTRYLTRNL

SEQ ID NO: 513 - protein, 736 aa, Artificial Sequence; identical to SEQ ID NO: 13
  source: /note="Description of Artificial Sequence: Synthetic polypeptide"

SEQ ID NO: 514 - DNA, 2217 bp, Artificial Sequence
  source: /note="Description of Artificial Sequence: Synthetic polynucleotide"
atggctgctgacggttatcttccagattggctcgaggacaacctctctgagggcattcgcgagtggtgggacctgaaacctggagcccccaagcccaaggccaaccagcagaagcaggacgacggccggggtctggtgcttcctggctacaagtacctcggacccttcaacggactcgacaagggggagcccgtcaacgcggcggacgcagcggccctcgagcacgacaaggcctacgaccagcagctcaaagcgggtgacaatccgtacctgcggtataaccacgccgacgccgagtttcaggagcgtctgcaagaagatacgtcttttgggggcaacctcgggcgagcagtcttccaggccaagaagcgggttctcgaacctctcggtctggttgaggaagctgctaagacggctcctggaaagaagagaccggtagaaccgtcacctcagcgttcccccgactcctccacgggcatcggcaagaaaggccagcagcccgctaaaaagagactgaactttggtcagactggcgactcagagtcagtccccgaccctcaaccaatcggagaaccaccagcaggcccctctggtctgggatctggtacaatggctgcaggcggtggcgctccaatggcagacaataacgaaggcgccgacggagtgggtagttcctcaggaaattggcattgcgattccacatggctgggcgacagagtcatcaccaccagcacccgaacctgggccctgcccacctacaacaaccacctctacaagcaaatatccaatgggacatcgggaggaagcaccaacgacaacacctacttcggctacagcaccccctgggggtattttgacttcaacagattccactgccacttctcaccacgtgactggcagcgactcatcaacaacaactggggattccggccaaaaagactcagcttcaagctcttcaacatccaggtcaaggaggtcacgcagaatgaaggcaccaagaccatcgccaataaccttaccagcacgattcaggtatttacggactcggaataccagctgccgtacgtcctcggctccgcgcaccagggctgcctgcctccgttcccggcggacgtcttcatgattccccagtacggctaccttacactgaacaatggaagtcaagccgtaggccgttcctccttctactgcctggaatattttccatctcaaatgctgcgaactggaaacaattttgaattcagctacaccttcgaggacgtgcctttccacagcagctacgcacacagccagagcttggaccgactgatgaatcctctcatcgaccagtacctgtactacttatccagaactcagtccacaggaggaactcaaggtacccagcaattgttattttctcaagctgggcctgcaaacatgtcggctcaggctaagaactggctacctggaccttgctaccggcagcagcgagtctctacgacactgtcgcaaaacaacaacagcaactttgcttggactggtgccaccaaatatcacctgaacggaagagactctttggtaaatcccggtgtcgccatggcaacccacaaggacgacgaggaacgcttcttcccgtcgagtggagtcctgatgtttggaaaacagggtgctggaagagacaatgtggactacagcagcgttatgctaaccagcgaagaagaaattaaaaccactaaccctgtagccacagaacaatacggtgtggtggctgacaacttgcagcaaaccaatacagggcctattgtgggaaatgtcaacagccaaggagccttacctggcatggtctggcagaaccgagacgtgtacctgcagggtcccatctgggccaagattcctcacacggacggcaacttccacccttcaccgctaatgggaggatttggactgaagcacccacctcctcagatcctgatcaagaacacgccggtacctgcggatcctccaacaacgttcagccaggcgaaattggcttccttcattacgcagtacagcaccggacaggtcagcgtggaaatcgagtgggagctgcagaaggagaacagcaaacgctggaacccagagattcagtacacttcaaactactacaaatctacaaatgtggactttgctgtcaatacagagggaacttattctgagcctcgccccattggtactcgttacctcacccgtaatctgtaa

SEQ ID NO: 515 - protein, 738 aa, Artificial Sequence
  source: /note="Description of Artificial Sequence: Synthetic polypeptide"
MAADGYLPDWLEDNLSEGIREWWDLKPGAPKPKANQQKQDDGRGLVLPGYKYLGPFNGLDKGEPVNAADAAALEHDKAYDQQLKAGDNPYLRYNHADAEFQERLQEDTSFGGNLGRAVFQAKKRVLEPLGLVEEGAKTAPGKKRPVEPSPQRSPDSSTGIGKKGQQPARKRLNFGQTGDSESVPDPQPLGEPPAAPSSVGSGTMAAGGGAPMADNNEGADGVGSSSGNWHCDSTWLGDRVITTSTRTWALPTYNNHLYKQISNGTSGGSTNDNTYFGYSTPWGYFDFNRFHCHFSPRDWQRLINNNWGFRPKRLSFKLFNIQVKEVTQNEGTKTIANNLTSTIQVFTDSEYQLPYVLGSAHQGCLPPFPADVFMIPQYGYLTLNNGSQAVGRSSFYCLEYFPSQMLRTGNNFSFSYTFEDVPFHSSYAHSQSLDRLMNPLIDQYLYYLSRTQSTGGTAGTQQLLFSQAGPSNMSAQARNWLPGPCYRQQRVSTTLSQNNNSNFAWTGATKYHLNGRDSLVNPGVAMATNKDDEDRFFPSSGILMFGKQGAGKDNVDYSNVMLTSEEEIKTTNPVATEQYGVVADNLQRQNTAPIVGAVNSQGALPGMVWQNRDVYLQGPIWAKIPHTDGNFHPSPLMGGFGLKHPPPQILIKNTPVPADPPTAFNQAKLNSFITQYSTGQVSVEIEWELQKENSKRWNPEIQYTSNYYKSTNVDFAVNTEGVYSEPRPIGTRYLTRNL

SEQ ID NO: 516 - protein, 736 aa, Artificial Sequence
  source: /note="Description of Artificial Sequence: Synthetic polypeptide"
MAADGYLPDWLEDNLSEGIREWLNLKPGAPQPKANQQKQDNARGLVLPGYKYLGPFNGLDKGDPVNEADAAALEHDKAYGQQLKAGDNPYLKYNHADAEFQERLQKDTSFGGNLGKAVFQAKKRILEPLGLVETPAKTAPGKKRPVDPSPQRSPDSSSGIGKKSPHPARKRLNFGQTGEAESVPDPQPIGEPPSDPSSVGSGTMAAGGGAPMADNNEGADGVGNSSGNWHCDSTWLGDRVITTSTRTWALPTYNNHLYKQISSQSGATNDNHYFGYSTPWGYFDFNRFHCHFSPRDWQRLINNNWGFRPKRLSFKLFNIQVKEVTQNDGTTTIANNLTSTVQVFTDSEYQLPYVLGSAHQGCLPPFPADVFMIPQYGYLTLNNGSQAVGRSSFYCLEYFPSQMLRTGNNFQFSYTFEDVPFHSSYAHSQSLDRLMNPLIDQYLYYLSKTQGTNATVQGAKLQFSQAGPSNMRDQARNWLPGPCYRQQRVSKTANDNNNSEYAWTGATKYHLNGRDSLVNPGPAMASHKDDEEKFFPMNGTLVFGKNGAGNSNVDIENVMITDEEEIRTTNPVATEQYGVVSDNLQSSNTRPITGDVDSQGVLPGMVWQDRDVYLQGPIWAKIPHTDGHFHPSPLMGGFGLKHPPPQILIKNTPVPANPATTFTPGKFASFITQYSTGQVSVQIEWELQKENSKRWNPEIQYTSNYNKSVNVDFTVDTNGVYSEPRPIGTRYLTRNL

SEQ ID NO: 517 - protein, 736 aa, Artificial Sequence; identical to SEQ ID NO: 92
  source: /note="Description of Artificial Sequence: Synthetic polypeptide"

SEQ ID NO: 518 - protein, 736 aa, Artificial Sequence
  source: /note="Description of Artificial Sequence: Synthetic polypeptide"
MAADGYLPDWLEDNLSEGIREWWDLKPGAPKPKANQQKQDDGRGLVLPGYKYLGPFNGLDKGEPVNAADAAALEHDKAYDQQLKAGDNPYLRYNHADAEFQERLQEDTSFGGNLGRAVFQAKKRVLEPLGLVEEGAKTAPGKKRPVEQSPQEPDSSSGIGKTGQQPAKKRLNFGQTGDSESVPDPQPLGEPPAAPSGLGPNTMASGGGAPMADNNEGADGVGNSSGNWHCDSTWLGDRVITTSTRTWALPTYNNHLYKQISNGTSGGSTNDNTYFGYSTPWGYFDFNRFHCHFSPRDWQRLINNNWGFRPKRLNFKLFNIQVKEVTTNEGTKTIANNLTSTVQVFTDSEYQLPYVLGSAHQGCLPPFPADVFMVPQYGYLTLNNGSQALGRSSFYCLEYFPSQMLRTGNNFQFSYTFEDVPFHSSYAHSQSLDRLMNPLIDQYLYYLVRTQTTGTGGTQTLAFSQAGPSSMANQARNWVPGPCYRQQRVSTTTNQNNNSNFAWTGAAKFKLNGRDSLMNPGVAMASHKDDEDRFFPSSGVLIFGKQGAGNDGVDYSQVLITDEEEIKATNPVATEEYGAVAINNQAANTQAQTGLVHNQGVIPGMVWQNRDVYLQGPIWAKIPHTDGNFHPSPLMGGFGLKHPPPQILIKNTPVPADPPLTFNQAKLNSFITQYSTGQVSVEIEWELQKENSKRWNPEIQYTSNYYKSTNVDFAVNTEGVYSEPRPIGTRYLTRNL

SEQ ID NO: 519 - protein, 736 aa, Artificial Sequence; identical to SEQ ID NO: 518
  source: /note="Description of Artificial Sequence: Synthetic polypeptide"

SEQ ID NO: 520 - protein, 736 aa, Artificial Sequence
  source: /note="Description of Artificial Sequence: Synthetic polypeptide"
MAADGYLPDWLEDNLSEGIREWWDLKPGAPKPKANQQKQDDGRGLVLPGYKYLGPFNGLDKGEPVNAADAAALEHDKAYDQQLKAGDNPYLRYNHADAEFQERLQEDTSFGGNLGRAVFQAKKRVLEPLGLVEEGAKTAPGKKRPVEQSPQEPDSSSGIGKTGQQPAKKRLNFGQTGDSESVPDPQPLGEPPAAPSGLGPNTMASGGGAPMADNNEGADGVGNSSGNWHCDSTWLGDRVITTSTRTWALPTYNNHLYKQISNGTSGGSTNDNTYFGYSTPWGYFDFNRFHCHFSPRDWQRLINNNWGFRPKRLNFKLFNIQVKEVTTNEGTKTIANNLTSTVQVFTDSEYQLPYVLGSAHQGCLPPFPADVFMVPQYGYLTLNNGSQALGRSSFYCLEYFPSQMLRTGNNFQFSYTFEDVPFHSSYAHSQSLDRLMNPLIDQYLYYLVRTQTTGTGGTQTLAFSQAGPSSMANQARNWVPGPCYRQQRVSTTTNQNNNSNFAWTGAAKFKLNGRDSLMNPGVAMASHKDDEDRFFPSSGVLIFGKQGAGNDGVDYSQVLITDEEEIKATNPVATEEYGAVAINNQRANTQAQTGLVHNQGVIPGMVWQNRDVYLQGPIWAKIPHTDGNFHPSPLMGGFGLKHPPPQILIKNTPVPADPPLTFNQAKLNSFITQYSTGQVSVEIEWELQKENSKRWNPEIQYTSNYYKSTNVDFAVNTEGVYSEPRPIGTRYLTRNL

SEQ ID NO: 521 - protein, 736 aa, Artificial Sequence
  source: /note="Description of Artificial Sequence: Synthetic polypeptide"
MAADGYLPDWLEDNLSEGIREWWDLKPGAPKPKANQQKQDDGRGLVLPGYKYLGPFNGLDKGEPVNAADAAALEHDKAYDQQLKAGDNPYLRYNHADAEFQERLQEDTSFGGNLGRAVFQAKKRVLEPLGLVEEGAKTAPGKKRPVEQSPQEPDSSSGIGKTGQQPAKKRLNFGQTGDSESVPDPQPLGEPPAAPSGLGPNTMASGGGAPMADNNEGADGVGNSSGNWHCDSTWLGDRVITTSTRTWALPTYNNHLYKQISNGTSGGSTNDNTYFGYSTPWGYFDFNRFHCHFSPRDWQRLINNNWGFRPKRLNFKLFNIQVKEVTTNEGTKTIANNLTSTVQVFTDSEYQLPYVLGSAHQGCLPPFPADVFMVPQYGYLTLNNGSQALGRSSFYCLEYFPSQMLRTGNNFQFSYTFEDVPFHSSYAHSQSLDRLMNPLIDQYLYYLVRTQTTGTGGTQTLAFSQAGPSSMANQARNWVPGPCYRQQRVSTTTNQNNNSNFAWTGAAKFKLNGRDSLMNPGVAMASHKDDEDAFFPSSGVLIFGKQGAGNDGVDYSQVLITDEEEIKATNPVATEEYGAVAINNQAANTQAQTGLVHNQGVIPGMVWQNRDVYLQGPIWAKIPHTDGNFHPSPLMGGFGLKHPPPQILIKNTPVPADPPLTFNQAKLNSFITQYSTGQVSVEIEWELQKENSKRWNPEIQYTSNYYKSTNVDFAVNTEGVYSEPRPIGTRYLTRNL

SEQ ID NO: 522 - DNA, 1803 bp, Bovine adeno-associated virus
acggcgcctgcggcaaaaaagaggcctctagagcagagtcctcaagagccagactcctcgagcggagttggcaagaaaggcaaacagcctgccagaaagagactcaactttgacgacgaacctggagccggagacgggcctcccccagaaggaccatcttccggagctatgtctactgagactgaaatgcgtgcagcagctggcggaaatggtggcgatgcgggacaaggtgccgagggagtgggtaatgcctccggtgattggcattgcgattccacttggtcagagagccacgtcaccaccacctcaacccgcacctgggtcctgccgacctacaacaaccacctgtacctgcggctcggctcgagcaacgccagcgacaccttcaacggattctccaccccctggggatactttgactttaaccgcttccactgccacttctcgccaagagactggcaaaggctcatcaacaaccactggggactgcgccccaaaagcatgcaagtccgcatcttcaacatccaagttaaggaggtcacgacgtctaacggggagacgaccgtatccaacaacctcaccagcacggtccagatctttgcggacagcacgtacgagctcccgtacgtgatggatgcaggtcaggagggcagcttgcctcctttccccaacgacgtgttcatggtgcctcagtacgggtactgcggactggtaaccggaggcagctctcaaaaccagacagacagaaatgccttctactgtctggagtactttcccagccagatgctgagaaccggaaacaactttgagatggtgtacaagtttgaaaacgtgcccttccactccatgtacgctcacagccagagcctggataggctgatgaacccgctgctggaccagtacctgtgggagctccagtctaccacctctggaggaactctcaaccagggcaattcagccaccaactttgccaagctgaccaaaacaaacttttctggctaccgcaaaaactggctcccggggcccatgatgaagcagcagagattctccaagactgccagtcaaaactacaagattccccagggaagaaacaacagtctgctccattatgagaccagaactaccctcgacggaagatggagcaattttgccccgggaacggccatggcaaccgcagccaacgacgccaccgacttctctcaggcccagctcatctttgcggggcccaacatcaccggcaacaccaccacagatgccaataacctgatgttcacttcagaagatgaacttagggccaccaacccccgggacactgacctgtttggccacctggcaaccaaccagcaaaacgccaccaccgttcctaccgtagacgacgtggacggagtcggcgtgtacccgggaatggtgtggcaggacagagacatttactaccaagggcccatttgggccaaaattccacacacggatggacactttcacccgtctcctctcattggcggatttggactgaaaagcccgcctccacaaatattcatcaaaaacactcctgtacccgccaatcccgcaacgaccttctctccggccagaatcaacagcttcatcacccagtacagcaccggacaggtggctgtcaaaatagaatgggaaatccagaaggagcggtccaagagatggaacccagaggtccagttcacgtccaactacggagcacaggactcgcttctctgggctcccgacaacgccggagcctacaaagagcccagggccattggatcccgatacctcaccaaccacctctag

SEQ ID NO: 523 - DNA, 1617 bp, Bovine adeno-associated virus
atgcgtgcagcagctggcggaaatggtggcgatgcgggacaaggtgccgagggagtgggtaatgcctccggtgattggcattgcgattccacttggtcagagagccacgtcaccaccacctcaacccgcacctgggtcctgccgacctacaacaaccacctgtacctgcggctcggctcgagcaacgccagcgacaccttcaacggattctccaccccctggggatactttgactttaaccgcttccactgccacttctcgccaagagactggcaaaggctcatcaacaaccactggggactgcgccccaaaagcatgcaagtccgcatcttcaacatccaagttaaggaggtcacgacgtctaacggggagacgaccgtatccaacaacctcaccagcacggtccagatctttgcggacagcacgtacgagctcccgtacgtgatggatgcaggtcaggagggcagcttgcctcctttccccaacgacgtgttcatggtgcctcagtacgggtactgcggactggtaaccggaggcagctctcaaaaccagacagacagaaatgccttctactgtctggagtactttcccagccagatgctgagaaccggaaacaactttgagatggtgtacaagtttgaaaacgtgcccttccactccatgtacgctcacagccagagcctggataggctgatgaacccgctgctggaccagtacctgtgggagctccagtctaccacctctggaggaactctcaaccagggcaattcagccaccaactttgccaagctgaccaaaacaaacttttctggctaccgcaaaaactggctcccggggcccatgatgaagcagcagagattctccaagactgccagtcaaaactacaagattccccagggaagaaacaacagtctgctccattatgagaccagaactaccctcgacggaagatggagcaattttgccccgggaacggccatggcaaccgcagccaacgacgccaccgacttctctcaggcccagctcatctttgcggggcccaacatcaccggcaacaccaccacagatgccaataacctgatgttcacttcagaagatgaacttagggccaccaacccccgggacactgacctgtttggccacctggcaaccaaccagcaaaacgccaccaccgttcctaccgtagacgacgtggacggagtcggcgtgtacccgggaatggtgtggcaggacagagacatttactaccaagggcccatttgggccaaaattccacacacggatggacactttcacccgtctcctctcattggcggatttggactgaaaagcccgcctccacaaatattcatcaaaaacactcctgtacccgccaatcccgcaacgaccttctctccggccagaatcaacagcttcatcacccagtacagcaccggacaggtggctgtcaaaatagaatgggaaatccagaaggagcggtccaagagatggaacccagaggtccagttcacgtccaactacggagcacaggactcgcttctctgggctcccgacaacgccggagcctacaaagagcccagggccattggatcccgatacctcaccaaccacctctag

SEQ ID NO: 524 - DNA, 1173 bp, Bovine adeno-associated virus
atggcgctggtaagctggctggtggaacatggcatcacttccgagaagcagtggattcaggagaatcaggagagctacctgtccttcaactccacgggaaactctcggagccagattaaagccgcgcttgacaacgcgtcaaaaattatgagtctgaccaaatctgcctcagactatctcgtgggacagactgttccagaggacatttctgaaaacagaatctggcagatttttgatctcaacggctacgacccggcatacgcgggctctgttctctacggctggtgcactcgcgcctttggaaagaggaacaccgtctggctgtatggacccgcgaccaccggaaagaccaacatcgcggaagccatctctcacaccgtgcccttttatggctgtgtgaactggactaatgagaactttccctttaatgactgtgtggaaaaaatgttgatctggtgggaggagggaaagatgaccagcaaggtggtggaacccgccaaggccatcttgggggggtctagagtacgagtggatcaaaaatgtaaatcctctgtacaagtagactctaccccggtgattatcacctccaatactaacatgtgtgtggtggtggatgggaactccacgacctttgaacaccagcagccgctggaagaccgcatgttcagatttgaactcatgcggcggctcccgccagattttggcaagattaccaagcaggaagtcaaagacttttttgcttgggcaaaggtcaaccaggtgccggtgactcacgagtttatggttcccaagaaagtggcgggaactgagagggcggagacttctagaaaacgcccactggatgacgtcaccaataccaactataaaagtccggagaagcgggcccggctctcagttgttcctgagacgcctcgcagttcagacgtgcctgtagagcccgctcctctgcgacctctcaactggtcttccaggtatgaatgcagatgtgactatcatgctaaatttgactctgtaacgggggaatgtgacgagtgtgaatatttgaatcggggcaaaaatggctgtatctttcataatgctacacattgtcaaatttgtcacgctgttcctccatgggaaaaggaaaatgtgtcagattttaatgattttgatgactgtaataaagagcagtaa

SEQ ID NO: 525 - DNA, 1833 bp, Bovine adeno-associated virus
atggctaccttctatgaagtcattgttcgcgttccatttgatgtggaagagcacctgcctggaatttctgacaactttgtagactgggtaactggtcaaatttgggagctgcctcccgagtcagatttgaatttgactctgattgagcagcctcagctgacggtggctgacagaattcgccgcgtgttcctgtacgagtggaacaaattttccaagcaggagagcaaattctttgtgcagtttgaaaagggatctgaatattttcatctgcacacgctcgtggagacctccggcatctcttctatggtccttggccgctacgtgagtcagattcgcgcccagctggtgaaggtggtgttccagaacattgagccgcggattaacgactgggtcgccatcaccaaggtaaagaagggcggagccaataaggtggtggattctgggtatattcccgcctacctgctgccgaaggtccaaccagagcttcagtgggcgtggactaacctcgaagagtataaattggccgccctcaatctggaggagcgcaaacggctcgtcgctcagtttcagcttgagtcctcgcagcgctcgcaagaggcatcttcccagagggacgtttcggctgacccggtcatcaagagcaagacttcccagaaatacatggcgctggtaagctggctggtggaacatggcatcacttccgagaagcagtggattcaggagaatcaggagagctacctgtccttcaactccacgggaaactctcggagccagattaaagccgcgcttgacaacgcgtcaaaaattatgagtctgaccaaatctgcctcagactatctcgtgggacagactgttccagaggacatttctgaaaacagaatctggcagatttttgatctcaacggctacgacccggcatacgcgggctctgttctctacggctggtgcactcgcgcctttggaaagaggaacaccgtctggctgtatggacccgcgaccaccggaaagaccaacatcgcggaagccatctctcacaccgtgcccttttatggctgtgtgaactggactaatgagaactttccctttaatgactgtgtggaaaaaatgttgatctggtgggaggagggaaagatgaccagcaaggtggtggaacccgccaaggccatcttgggggggtctagagtacgagtggatcaaaaatgtaaatcctctgtacaagtagactctaccccggtgattatcacctccaatactaacatgtgtgtggtggtggatgggaactccacgacctttgaacaccagcagccgctggaagaccgcatgttcagatttgaactcatgcggcggctcccgccagattttggcaagattaccaagcaggaagtcaaagacttttttgcttgggcaaaggtcaaccaggtgccggtgactcacgagtttatggttcccaagaaagtggcgggaactgagagggcggagacttctagaaaacgcccactggatgacgtcaccaataccaactataaaagtccggagaagcgggcccggctctcagttgttcctgagacgcctcgcagttcagacgtgcctgtagagcccgctcctctgcgacctctcaactggtcttccaggtatgaatgcagatgtgactatcatgctaaatttgactctgtaacgggggaatgtgacgagtgtgaatatttgaatcggggcaaaaatggctgtatctttcataatgctacacattgtcaaatttgtcacgctgttcctccatgggaaaaggaaaatgtgtcagattttaatgattttgatgactgtaataaagagcagtaa

SEQ ID NO: 526 - DNA, 2211 bp, Bovine adeno-associated virus
atgtcttttgttgaccaccctccagattggttggaatcgatcggcgacggctttcgtgaatttctcggccttgaggcgggtcccccgaaacccaaggccaatcaacagaagcaagataacgctcgaggtcttgtgcttcctgggtacaagtatcttggtcctgggaacggccttgataagggcgatcctgtcaattttgctgacgaggttgcccgagagcacgacctctcctaccagaaacagcttgaggcgggcgataacccttacctcaagtacaaccacgcggacgcagagtttcaggagaaactcgcttctgacacttcttttgggggaaaccttgggaaggctgttttccaggctaaaaagaggattctcgaacctcttggcctggttgagacgccggataaaacggcgcctgcggcaaaaaagaggcctctagagcagagtcctcaagagccagactcctcgagcggagttggcaagaaaggcaaacagcctgccagaaagagactcaactttgacgacgaacctggagccggagacgggcctcccccagaaggaccatcttccggagctatgtctactgagactgaaatgcgtgcagcagctggcggaaatggtggcgatgcgggacaaggtgccgagggagtgggtaatgcctccggtgattggcattgcgattccacttggtcagagagccacgtcaccaccacctcaacccgcacctgggtcctgccgacctacaacaaccacctgtacctgcggctcggctcgagcaacgccagcgacaccttcaacggattctccaccccctggggatactttgactttaaccgcttccactgccacttctcgccaagagactggcaaaggctcatcaacaaccactggggactgcgccccaaaagcatgcaagtccgcatcttcaacatccaagttaaggaggtcacgacgtctaacggggagacgaccgtatccaacaacctcaccagcacggtccagatctttgcggacagcacgtacgagctcccgtacgtgatggatgcaggtcaggagggcagcttgcctcctttccccaacgacgtgttcatggtgcctcagtacgggtactgcggactggtaaccggaggcagctctcaaaaccagacagacagaaatgccttctactgtctggagtactttcccagccagatgctgagaaccggaaacaactttgagatggtgtacaagtttgaaaacgtgcccttccactccatgtacgctcacagccagagcctggataggctgatgaacccgctgctggaccagtacctgtgggagctccagtctaccacctctggaggaactctcaaccagggcaattcagccaccaactttgccaagctgaccaaaacaaacttttctggctaccgcaaaaactggctcccggggcccatgatgaagcagcagagattctccaagactgccagtcaaaactacaagattccccagggaagaaacaacagtctgctccattatgagaccagaactaccctcgacggaagatggagcaattttgccccgggaacggccatggcaaccgcagccaacgacgccaccgacttctctcaggcccagctcatctttgcggggcccaacatcaccggcaacaccaccacagatgccaataacctgatgttcacttcagaagatgaacttagggccaccaacccccgggacactgacctgtttggccacctggcaaccaaccagcaaaacgccaccaccgttcctaccgtagacgacgtggacggagtcggcgtgtacccgggaatggtgtggcaggacagagacatttactaccaagggcccatttgggccaaaattccacacacggatggacactttcacccgtctcctctcattggcggatttggactgaaaagcccgcctccacaaatattcatcaaaaacactcctgtacccgccaatcccgcaacgaccttctctccggccagaatcaacagcttcatcacccagtacagcaccggacaggtggctgtcaaaatagaatgggaaatccagaaggagcggtccaagagatggaacccagaggtccagttcacgtccaactacggagcacaggactcgcttctctgggctcccgacaacgccggagcctacaaagagcccagggccattggatcccgatacctcaccaaccacctctag

SEQ ID NO: 527 - DNA, 4694 bp, Bovine adeno-associated virus
gtggcactcccccccctgtcgcgttcgctcgttcgctggctcgattgggggggtggcagctcaaagagctgccagacgacggccctctgggccgtcgcccccccaatcgagccagcgaacgagcgaacgcgacaggggggggagtgccacactctctagcaagggggttttgtaggtggtgatgtcattgttgatgtcattatagttgtcacgcgatagttaatgattaacagtcatgtgatgtgtgttatccaataggatgaaagcgcgcgaatgagatctcgcgagacttccggggtataaaaggggtgagtgaacgagcccgccgccattctctgctctggactgctagaggaccctcgctgccatggctaccttctatgaagtcattgttcgcgttccatttgatgtggaagagcacctgcctggaatttctgacaactttgtagactgggtaactggtcaaatttgggagctgcctcccgagtcagatttgaatttgactctgattgagcagcctcagctgacggtggctgacagaattcgccgcgtgttcctgtacgagtggaacaaattttccaagcaggagagcaaattctttgtgcagtttgaaaagggatctgaatattttcatctgcacacgctcgtggagacctccggcatctcttctatggtccttggccgctacgtgagtcagattcgcgcccagctggtgaaggtggtgttccagaacattgagccgcggattaacgactgggtcgccatcaccaaggtaaagaagggcggagccaataaggtggtggattctgggtatattcccgcctacctgctgccgaaggtccaaccagagcttcagtgggcgtggactaacctcgaagagtataaattggccgccctcaatctggaggagcgcaaacggctcgtcgctcagtttcagcttgagtcctcgcagcgctcgcaagaggcatcttcccagagggacgtttcggctgacccggtcatcaagagcaagacttcccagaaatacatggcgctggtaagctggctggtggaacatggcatcacttccgagaagcagtggattcaggagaatcaggagagctacctgtccttcaactccacgggaaactctcggagccagattaaagccgcgcttgacaacgcgtcaaaaattatgagtctgaccaaatctgcctcagactatctcgtgggacagactgttccagaggacatttctgaaaacagaatctggcagatttttgatctcaacggctacgacccggcatacgcgggctctgttctctacggctggtgcactcgcgcctttggaaagaggaacaccgtctggctgtatggacccgcgaccaccggaaagaccaacatcgcggaagccatctctcacaccgtgcccttttatggctgtgtgaactggactaatgagaactttccctttaatgactgtgtggaaaaaatgttgatctggtgggaggagggaaagatgaccagcaaggtggtggaacccgccaaggccatcttgggggggtctagagtacgagtggatcaaaaatgtaaatcctctgtacaagtagactctaccccggtgattatcacctccaatactaacatgtgtgtggtggtggatgggaactccacgacctttgaacaccagcagccgctggaagaccgcatgttcagatttgaactcatgcggcggctcccgccagattttggcaagattaccaagcaggaagtcaaagacttttttgcttgggcaaaggtcaaccaggtgccggtgactcacgagtttatggttcccaagaaagtggcgggaactgagagggcggagacttctagaaaacgcccactggatgacgtcaccaataccaactataaaagtccggagaagcgggcccggctctcagttgttcctgagacgcctcgcagttcagacgtgcctgtagagcccgctcctctgcgacctctcaactggtcttccaggtatgaatgcagatgtgactatcatgctaaatttgactctgtaacgggggaatgtgacgagtgtgaatatttgaatcggggcaaaaatggctgtatctttcataatgctacacattgtcaaatttgtcacgctgttcctccatgggaaaaggaaaatgtgtcagattttaatgattttgatgactgtaataaagagcagtaaataaagtgagtagtcatgtcttttgttgaccaccctccagattggttggaatcgatcggcgacggctttcgtgaatttctcggccttgaggcgggtcccccgaaacccaaggccaatcaacagaagcaagataacgctcgaggtcttgtgcttcctgggtacaagtatcttggtcctgggaacggccttgataagggcgatcctgtcaattttgctgacgaggttgcccgagagcacgacctctcctaccagaaacagcttgaggcgggcgataacccttacctcaagtacaaccacgcggacgcagagtttcaggagaaactcgcttctgacacttcttttgggggaaaccttgggaaggctgttttccaggctaaaaagaggattctcgaacctcttggcctggttgagacgccggataaaacggcgcctgcggcaaaaaagaggcctctagagcagagtcctcaagagccagactcctcgagcggagttggcaagaaaggcaaacagcctgccagaaagagactcaactttgacgacgaacctggagccggagacgggcctcccccagaaggaccatcttccggagctatgtctactgagactgaaatgcgtgcagcagctggcggaaatggtggcgatgcgggacaaggtgccgagggagtgggtaatgcctccggtgattggcattgcgattccacttggtcagagagccacgtcaccaccacctcaacccgcacctgggtcctgccgacctacaacaaccacctgtacctgcggctcggctcgagcaacgccagcgacaccttcaacggattctccaccccctggggatactttgactttaaccgcttccactgccacttctcgccaagagactggcaaaggctcatcaacaaccactggggactgcgccccaaaagcatgcaagtccgcatcttcaacatccaagttaaggaggtcacgacgtctaacggggagacgaccgtatccaacaacctcaccagcacggtccagatctttgcggacagcacgtacgagctcccgtacgtgatggatgcaggtcaggagggcagcttgcctcctttccccaacgacgtgttcatggtgcctcagtacgggtactgcggactggtaaccggaggcagctctcaaaaccagacagacagaaatgccttctactgtctggagtactttcccagccagatgctgagaaccggaaacaactttgagatggtgtacaagtttgaaaacgtgcccttccactccatgtacgctcacagccagagcctggataggctgatgaacccgctgctggaccagtacctgtgggagctccagtctaccacctctggaggaactctcaaccagggcaattcagccaccaactttgccaagctgaccaaaacaaacttttctggctaccgcaaaaactggctcccggggcccatgatgaagcagcagagattctccaagactgccagtcaaaactacaagattccccagggaagaaacaacagtctgctccattatgagaccagaactaccctcgacggaagatggagcaattttgccccgggaacggccatggcaaccgcagccaacgacgccaccgacttctctcaggcccagctcatctttgcggggcccaacatcaccggcaacaccaccacagatgccaataacctgatgttcacttcagaagatgaacttagggccaccaacccccgggacactgacctgtttggccacctggcaaccaaccagcaaaacgccaccaccgttcctaccgtagacgacgtggacggagtcggcgtgtacccgggaatggtgtggcaggacagagacatttactaccaagggcccatttgggccaaaattccacacacggatggacactttcacccgtctcctctcattggcggatttggactgaaaagcccgcctccacaaatattcatcaaaaacactcctgtacccgccaatcccgcaacgaccttctctccggccagaatcaacagcttcatcacccagtacagcaccggacaggtggctgtcaaaatagaatgggaaatccagaaggagcggtccaagagatggaacccagaggtccagttcacgtccaactacggagcacaggactcgcttctctgggctcccgacaacgccggagcctacaaagagcccagggccattggatcccgatacctcaccaaccacctctagcccaattctgttgcataccctcaataaaccgtgtattcgtttcagtaaaatactgcctcttgtggtcattcggcgtacaacagcttacaacaacaacaaaacccccttgctagagagtgtggcactcccccccctgtcgcgttcgctcgttcgctggctcgattgggggggtggcagctcaaagagctgccagacgacggccctctgggccgtcgcccccccaatcgagccagcgaacgagcgaacgcgacaggggggggagtgccac

SEQ ID NO: 528 - protein, 390 aa, Bovine adeno-associated virus
MALVSWLVEHGITSEKQWIQENQESYLSFNSTGNSRSQIKAALDNASKIMSLTKSASDYLVGQTVPEDISENRIWQIFDLNGYDPAYAGSVLYGWCTRAFGKRNTVWLYGPATTGKTNIAEAISHTVPFYGCVNWTNENFPFNDCVEKMLIWWEEGKMTSKVVEPAKAILGGSRVRVDQKCKSSVQVDSTPVIITSNTNMCVVVDGNSTTFEHQQPLEDRMFRFELMRRLPPDFGKITKQEVKDFFAWAKVNQVPVTHEFMVPKKVAGTERAETSRKRPLDDVTNTNYKSPEKRARLSVVPETPRSSDVPVEPAPLRPLNWSSRYECRCDYHAKFDSVTGECDECEYLNRGKNGCIFHNATHCQICHAVPPWEKENVSDFNDFDDCNKEQ

SEQ ID NO: 529 - protein, 610 aa, Bovine adeno-associated virus
MATFYEVIVRVPFDVEEHLPGISDNFVDWVTGQIWELPPESDLNLTLIEQPQLTVADRIRRVFLYEWNKFSKQESKFFVQFEKGSEYFHLHTLVETSGISSMVLGRYVSQIRAQLVKVVFQNIEPRINDWVAITKVKKGGANKVVDSGYIPAYLLPKVQPELQWAWTNLEEYKLAALNLEERKRLVAQFQLESSQRSQEASSQRDVSADPVIKSKTSQKYMALVSWLVEHGITSEKQWIQENQESYLSFNSTGNSRSQIKAALDNASKIMSLTKSASDYLVGQTVPEDISENRIWQIFDLNGYDPAYAGSVLYGWCTRAFGKRNTVWLYGPATTGKTNIAEAISHTVPFYGCVNWTNENFPFNDCVEKMLIWWEEGKMTSKVVEPAKAILGGSRVRVDQKCKSSVQVDSTPVIITSNTNMCVVVDGNSTTFEHQQPLEDRMFRFELMRRLPPDFGKITKQEVKDFFAWAKVNQVPVTHEFMVPKKVAGTERAETSRKRPLDDVTNTNYKSPEKRARLSVVPETPRSSDVPVEPAPLRPLNWSSRYECRCDYHAKFDSVTGECDECEYLNRGKNGCIFHNATHCQICHAVPPWEKENVSDFNDFDDCNKEQ

SEQ ID NO: 530 - protein, 538 aa, Bovine adeno-associated virus
MRAAAGGNGGDAGQGAEGVGNASGDWHCDSTWSESHVTTTSTRTWVLPTYNNHLYLRLGSSNASDTFNGFSTPWGYFDFNRFHCHFSPRDWQRLINNHWGLRPKSMQVRIFNIQVKEVTTSNGETTVSNNLTSTVQIFADSTYELPYVMDAGQEGSLPPFPNDVFMVPQYGYCGLVTGGSSQNQTDRNAFYCLEYFPSQMLRTGNNFEMVYKFENVPFHSMYAHSQSLDRLMNPLLDQYLWELQSTTSGGTLNQGNSATNFAKLTKTNFSGYRKNWLPGPMMKQQRFSKTASQNYKIPQGRNNSLLHYETRTTLDGRWSNFAPGTAMATAANDATDFSQAQLIFAGPNITGNTTTDANNLMFTSEDELRATNPRDTDLFGHLATNQQNATTVPTVDDVDGVGVYPGMVWQDRDIYYQGPIWAKIPHTDGHFHPSPLIGGFGLKSPPPQIFIKNTPVPANPATTFSPARINSFITQYSTGQVAVKIEWEIQKERSKRWNPEVQFTSNYGAQDSLLWAPDNAGAYKEPRAIGSRYLTNHL

SEQ ID NO: 531 - protein, 736 aa, Artificial Sequence
  source: /note="Description of Artificial Sequence: Synthetic polypeptide"
MSFVDHPPDWLESIGDGFREFLGLEAGPPKPKANQQKQDNARGLVLPGYKYLGPGNGLDKGDPVNFADEVAREHDLSYQKQLEAGDNPYLKYNHADAEFQEKLASDTSFGGNLGKAVFQAKKRILEPLGLVETPDKTAPAAKKRPLEQSPQEPDSSSGVGKKGKQPARKRLNFDDEPGAGDGPPPEGPSSGAMSTETEMRAAAGGNGGDAGQGAEGVGNASGDWHCDSTWSESHVTTTSTRTWVLPTYNNHLYLRLGSSNASDTFNGFSTPWGYFDFNRFHCHFSPRDWQRLINNHWGLRPKSMQVRIFNIQVKEVTTSNGETTVSNNLTSTVHIFADSTYELPYVMDAGQEGSLPPFPNDVFMVPQYGYCGLVTGGSSQNQTDRNAFYCLEYFPSQMLRTGNNFEMVYKFENVPFHSMYAHSQSLDRLMNPLLDQYLWELQSTTSGGTLNQGNSATNFAKLTNKNFSGYRKNWLPGPMMKQQRFSKTASQNYKIPQGGNNSLLHYETRTTLDRRWSNFAPGTAMATAANDATDFSQAQLIFAGPNITGNTTTDANNLMFTSEDELRATNPRDTDLFGHLATNQQNATTVPTVDDVDGVGVYPGMVWQDRDIYYQGPIWAKIPHTDGHFHPSPLIGGFGLKSPPPQIFIKNTPVPANPATTFSPARINSFITQYSTGQVAVKIEWEIQKERSKRWNPEVQFTSNYGAQDSLLWAPDNAGAYKEPRAIGSRYLTNHL

SEQ ID NO: 532 - protein, 736 aa, Artificial Sequence
  source: /note="Description of Artificial Sequence: Synthetic polypeptide"
MSFVDHPPDWLESIGDGFREFLGLEAGPPKPKANQQKQDNARGLVLPGYKYLGPGNGLDKGDPVNFADEVAREHDLSYQKQLEAGDNPYLKYNHADAEFQEKLASDTSFGGNLGKAVFQAKKRILEPLGLVETPDKTAPAAKKRPLEQSPQEPDSSSGVGKKGKQPARKRLNFDDEPGAGDGPPPEGPSSGAMSTETEMRAAAGGNGGDAGQGAEGVGNASGDWHCDSTWSESHVTTTSTRTWVLPTYNNHLYLRLGSSNASDTFNGFSTPWGYFDFNRFHCHFSPRDWQRLINNHWGLRPKSMQVRIFNIQVKEVTTSNGETTVSNNLTSTVQIFADSTYELPYVMDAGQEGSLPPFPNDVFMVPQYGYCGLVTGGSSQNQTDRNAFYCLEYFPSQMLRTGNNFEMVYKFENVPFHSMYAHSQSLDRLMNPLLDQYLWELQSTTSGGTLNQGNSATNFAKLTKTNFSGYRKNWLPGPMMKQQRFSKTASQNYKIPQGRNNSLLHYETRTTLDGRWSNFAPGTAMATAANDATDFSQAQLIFAGPNITGNTTTDANNLMFTSEDELRATNPRDTDLFGHLATNQQNATTVPTVDDVDGVGVYPGMVWQDRDIYYQGPIWAKIPHTDGHFHPSPLIGGFGLKSPPPQIFIKNTPVPANPATTFSPARINSFITQYSTGQVAVKIEWEIQKERSKRWNPEVQFTSNYGAQDSLLWAPDNAGAYKEPRAIGSRYLTNHL

SEQ ID NO: 533 - protein, 736 aa, Bovine adeno-associated virus; identical to SEQ ID NO: 532

SEQ ID NO: 534 - protein, 600 aa, Bovine adeno-associated virus
TAPAAKKRPLEQSPQEPDSSSGVGKKGKQPARKRLNFDDEPGAGDGPPPEGPSSGAMSTETEMRAAAGGNGGDAGQGAEGVGNASGDWHCDSTWSESHVTTTSTRTWVLPTYNNHLYLRLGSSNASDTFNGFSTPWGYFDFNRFHCHFSPRDWQRLINNHWGLRPKSMQVRIFNIQVKEVTTSNGETTVSNNLTSTVQIFADSTYELPYVMDAGQEGSLPPFPNDVFMVPQYGYCGLVTGGSSQNQTDRNAFYCLEYFPSQMLRTGNNFEMVYKFENVPFHSMYAHSQSLDRLMNPLLDQYLWELQSTTSGGTLNQGNSATNFAKLTKTNFSGYRKNWLPGPMMKQQRFSKTASQNYKIPQGRNNSLLHYETRTTLDGRWSNFAPGTAMATAANDATDFSQAQLIFAGPNITGNTTTDANNLMFTSEDELRATNPRDTDLFGHLATNQQNATTVPTVDDVDGVGVYPGMVWQDRDIYYQGPIWAKIPHTDGHFHPSPLIGGFGLKSPPPQIFIKNTPVPANPATTFSPARINSFITQYSTGQVAVKIEWEIQKERSKRWNPEVQFTSNYGAQDSLLWAPDNAGAYKEPRAIGSRYLTNHL

SEQ ID NO: 535 - DNA, 2214 bp, Artificial Sequence
  source: /note="Description of Artificial Sequence: Synthetic polynucleotide"
atggctgccgatggttatcttccagattggctcgaggacactctctctgaaggaataagacagtggtggaagctcaaacctggcccaccaccaccaaagcccgcagagcggcataaggacgacagcaggggtcttgtgcttcctgggtacaagtacctcggacccttcaacggactcgacaagggagagccggtcaacgaggcagacgccgcggccctcgagcacgacaaagcctacgaccggcagctcgacagcggagacaacccgtacctcaagtacaaccacgccgacgcggagtttcaggagcgccttaaagaagatacgtcttttgggggcaacctcgggcgagcagtcttccaggccaaaaagaggcttcttgaacctcttggtctggttgaggaagcggctaagacggctcctggaaagaagaggcctgtagagcagtctcctcaggaaccggactcctcctcgggcatcggcaagacaggccagcagcccgctaaaaagagactcaatttcggtcagactggcgacacagagtcagtcccagaccctcaaccaatcggagaacctcccgcagccccctcaggtgtgggatctcttacaatggcttcaggtggtggcgcaccagtggcagacaataacgaaggtgccgatggagtgggtagttcctcgggaaattggcattgcgattcccaatggctgggggacagagtcatcaccaccagcacccgaacctgggccctgcccacctacaacaatcacctctacaagcaaatctccaacgggacatcgggaggagccaccaacgacaacacctacttcggctacagcaccccctgggggtattttgactttaacagattccactgccacttttcaccacgtgactggcagcgactcatcaacaacaactggggattccggcccaagagactcagcttcaagctcttcaacatccaggtcaaggaggtcacgcagaatgaaggcaccaagaccatcgccaataaccttaccagcacggtccaggtcttcacggactcggagtaccagctgccgtacgttctcggctctgcccaccagggctgcctgcctccgttcccggcggacgtgttcatgattccccagtacggctacctaacactcaacaacggtagtcaggccgtgggacgctcctccttctactgcctggaatactttccttcgcagatgctgagaaccggcaacaacttccagtttacttacaccttcgaggacgtgcctttccacagcagctacgcccacagccagagcttggaccggctgatgaatcctctgattgaccagtacctgtactacttgtctcggactcaaacaacaggaggcacggcaaatacgcagactctgggcttcagccaaggtgggcctaatacaatggccaatcaggcaaagaactggctgccaggaccctgttaccgccaacaacgcgtctcaacgacaaccgggcaaaacaacaatagcaactttgcctggactgctgggaccaaataccatctgaatggaagaaattcattggctaatcctggcatcgctatggcaacacacaaagacgacaaggagcgtttttttcccagtaacgggatcctgatttttggcaaacaaaatgctgccagagacaatgcggattacagcgatgtcatgctcaccagcgaggaagaaatcaaaaccactaaccctgtggctacagaggaatacggtatcgtggcagataacttgcagcagcaaaacacggctcctcaaattggaactgtcaacagccagggggccttacccggtatggtttggcagaaccgggacgtgtacctgcagggtcccatctgggccaagattcctcacacggacggcaacttccacccgtctccgctgatgggcggctttggcctgaaacatcctccgcctcagatcctgatcaagaacacgcctgtacctgcggatcctccgaccaccttcaaccagtcaaagctgaactctttcatcacgcaatacagcaccggacaggtcagcgtggaaattgaatgggagctgcagaaggaaaacagcaagcgctggaaccccgagatccagtacacctccaactactacaaatctacaagtgtggactttgctgttaatacagaaggcgtgtactctgaaccccaccccattggcacccgttacctcacccgtcccctgtaa

SEQ ID NO: 536 - protein, 737 aa, Artificial Sequence
  source: /note="Description of Artificial Sequence: Synthetic polypeptide"
MAADGYLPDWLEDTLSEGIRQWWKLKPGPPPPKPAERHKDDSRGLVLPGYKYLGPFNGLDKGEPVNEADAAALEHDKAYDRQLDSGDNPYLKYNHADAEFQERLKEDTSFGGNLGRAVFQAKKRLLEPLGLVEEAAKTAPGKKRPVEQSPQEPDSSSGIGKTGQQPAKKRLNFGQTGDTESVPDPQPIGEPPAAPSGVGSLTMASGGGAPVADNNEGADGVGSSSGNWHCDSQWLGDRVITTSTRTWALPTYNNHLYKQISNGTSGGATNDNTYFGYSTPWGYFDFNRFHCHFSPRDWQRLINNNWGFRPKRLSFKLFNIQVKEVTQNEGTKTIANNLTSTVQVFTDSEYQLPYVLGSAHQGCLPPFPADVFMIPQYGYLTLNNGSQAVGRSSFYCLEYFPSQMLRTGNNFQFTYTFEDVPFHSSYAHSQSLDRLMNPLIDQYLYYLSRTQTTGGTANTQTLGFSQGGPNTMANQAKNWLPGPCYRQQRVSTTTGQNNNSNFAWTAGTKYHLNGRNSLANPGIAMATHKDDKERFFPSNGILIFGKQNAARDNADYSDVMLTSEEEIKTTNPVATEEYGIVADNLQQQNTAPQIGTVNSQGALPGMVWQNRDVYLQGPIWAKIPHTDGNFHPSPLMGGFGLKHPPPQILIKNTPVPADPPTTFNQSKLNSFITQYSTGQVSVEIEWELQKENSKRWNPEIQYTSNYYKSTSVDFAVNTEGVYSEPHPIGTRYLTRPL

SEQ ID NO: 537 - protein, 736 aa, Artificial Sequence
  source: /note="Description of Artificial Sequence: Synthetic polypeptide"
MAADGYLPDWLEDNLSEGIREWWDLKPGAPKPKANQQKQDDGRGLVLPGYKYLGPFNGLDKGEPVNAADAAALEHDKAYDQQLKAGDNPYLRYNHADAEFQERLQEDTSFGGNLGRAVFQAKKRVLEPLGLVEEGAKTAPGKKRPVEQSPQEPDSSSGIGKTGQQPAKKRLNFGQTGDTESVPDPQPIGEPPAAPSGVGSLTMASGGGAPVADNNEGADGVGSSSGNWHCDSQWLGDRVITTSTRTWALPTYNNHLYKQISSASTGASNDNHYFGYSTPWGYFDFNRFHCHFSPRDWQRLINNNWGFRPKRLNFKLFNIQVKEVTDNNGVKTIANNLTSTVQVFTDSDYQLPYVLGSAHQGCLPPFPADVFMIPQYGYLTLNNGSQAVGRSSFYCLEYFPSQMLRTGNNFQFTYTFEDVPFHSSYAHSQSLDRLMNPLIDQYLYYLSRTQTTGGTANTQTLGFSQGGPNTMANQAKNWLPGPCYRQQRVSTTTGQNNNSNFAWTAGTKYHLNGRNSLANPGIAMATHKDDKERFFPSNGILIFGKQNAARDNADYSDVMLTSEEEIKTTNPVATEEYGIVADNLQQQNTAPQIGTVNSQGALPGMVWQNRDVYLQGPIWAKIPHTDGNFHPSPLMGGFGLKHPPPQILIKNTPVPADPPTTFNQSKLNSFITQYSTGQVSVEIEWELQKENSKRWNPEIQYTSNYYKSTSVDFAVNTEGVYSEPHPIGTRYLTRPL

SEQ ID NO: 538 - protein, 736 aa, Artificial Sequence
  source: /note="Description of Artificial Sequence: Synthetic polypeptide"
MAADGYLPDWLEDTLSEGIRQWWKLKPGPPPPKPAERHKDDSRGLVLPGYKYLGPFNGLDKGEPVNEADAAALEHDKAYDRQLDSGDNPYLKYNHADAEFQERLQGDTSFGGNLGRAVFQAKKRVLEPLGLVEEGAKTAPGKKRPVEQSPQEPDSSSGIGETGQQPAKKRLNFGQTGDSESVPDPQPLGEPPATPAAVGPTTMASGGGAPMADNNEGADGVGSSSGNWHCDSQWLGDRVITTSTRTWALPTYNNHLYKQISSASTGASNDNHYFGYSTPWGYFDFNRFHCHFSPRDWQRLINNNWGFRPKRLSFKLFNIQVKEVTDNNGVKTIANNLTSTVQVFTDSEYQLPYVLGSAHQGCLPPFPADVFMIPQYGYLTLNNGSQAVGRSSFYCLEYFPSQMLRTGNNFTFSYTFEDVPFHSSYAHSQSLDRLMNPLIDQYLYYLSRTQTTGGTANTQTLGFSQGGPNTMANQAKNWLPGPCYRQQRVSTTTGQNNNSNFAWTAGTKYHLNGRNSLANPGIAMATHKDDKERFFPSNGILIFGKQNAARDNADYSDVMLTSEEEIKTTNPVATEEYGIVADNLQQQNTAPQIGTVNSQGALPGMVWQNRDVYLQGPIWAKIPHTDGNFHPSPLMGGFGLKHPPPQILIKNTPVPADPPTTFNQSKLNSFITQYSTGQVSVEIEWELQKENSKRWNPEIQYTSNYYKSTSVDFAVNTEGVYSEPHPIGTRYLTRPL

SEQ ID NO: 539 - DNA, 2181 bp, Artificial Sequence
  source: /note="Description of Artificial Sequence: Synthetic polynucleotide"
atgtcttttgttgatcaccctccagattggttggaagaagttggtgaaggtcttcgcgagtttttgggccttgaagcgggcccaccgaaaccaaaacccaatcagcagcatcaagatcaagcccgtggtcttgtgctgcctggttataactatctcggacccggaaacggtctcgatcgaggagagcctgtcaacagggcagacgaggtcgcgcgagagcacgacatctcgtacaacgagcagcttgaggcgggagacaacccctacctcaagtacaaccacgcggacgccgagtttcaggagaagctcgccgacgacacatccttcgggggaaacctcggaaaggcagtctttcaggccaagaaaagggttctcgaaccttttggcctggttgaagagggtgctaagacggcccctaccggaaagcggatagacgaccactttccaaaaagaaagaaggctcggaccgaagaggactccaagccttccacctcgtcagacgccgaagctggacccagcggatcccagcagctgcaaatcccagcacaaccagcctcaagtttgggagctgatacaatgtctgcgggaggtggcggcccattgggcgacaataaccaaggtgccgatggagtgggcaatgcctcgggagattggcattgcgattccacgtggatgggggacagagtcgtcaccaagtccacccgcacctgggtgctgcccagctacaacaaccaccagtaccgagagatcaaaagcggctccgtcgacggaagcaacgccaacgcctactttggatacagcaccccctgggggtactttgactttaaccgcttccacagccactggagcccccgagactggcaaagactcatcaacaactattggggcttcagaccccggtctctcagagtcaaaatcttcaacatccaagtcaaagaggtcacggtgcaggactccaccaccaccatcgccaacaacctcacctccaccgtccaagtgtttacggacgacgactaccaactcccgtacgtcgtcggcaacgggaccgagggatgcctgccggccttccccccgcaggtctttacgctgccgcagtacggctacgcgacgctgaaccgagacaacggagacaacccgacagagcggagcagcttcttttgcctagagtactttcccagcaagatgctgaggacgggcaacaactttgagtttacctacagctttgaagaggtgcccttccactgcagcttcgccccgagccagaacctctttaagctggccaacccgctggtggaccagtacctgtaccgcttcgtgagcacctcggccacgggcgccatccagttccaaaagaacctggcgggcagatacgccaacacctacaaaaactggttcccggggcccatgggccgaacccagggctggaacacgagctctggggtcagcagcaccaacagagtcagcgtcaacaacttttccgtctcaaaccggatgaacctggagggggccagctaccaagtgaacccccagcccaacgggatgacaaacacgctccaaggcagcaaccgctacgcgctggaaaacaccatgatcttcaacgctcaaaacgccacgccgggaactacctcggtgtacccagaggacaatctactgctgaccagcgagagcgagactcagcccgtcaaccgggtggcttacaacacgggcggtcagatggccaccaacgcccagaacgccaccacggctcccacggtcgggacctacaacctccaggaagtgcttcctggcagcgtatggatggagagggacgtgtacctccaaggacccatctgggccaagatcccagagacgggggcgcactttcacccctctccggccatgggcggattcggactcaaacacccgccgcccatgatgctcatcaaaaacacgccggtgcccggcaacatcaccagcttctcggacgtgcccgtcagcagcttcatcacccagtacagcaccgggcaggtcaccgtggagatggaatgggagctcaaaaaggaaaactccaagaggtggaacccagagatccagtacaccaacaactacaacgacccccagtttgtggactttgctccagacggctccggcgaatacagaaccaccagagccatcggaacccgatacctcacccgacccctt

SEQ ID NO: 540 - protein, 726 aa, Artificial Sequence
  source: /note="Description of Artificial Sequence: Synthetic polypeptide"
MSFVDHPPDWLEEVGEGLREFLGLEAGPPKPKPNQQHQDQARGLVLPGYNYLGPGNGLDRGEPVNRADEVAREHDISYNEQLEAGDNPYLKYNHADAEFQEKLADDTSFGGNLGKAVFQAKKRVLEPFGLVEEGAKTAPTGKRIDDHFPKRKKARTEEDSKPSTSSDAEAGPSGSQQLQIPAQPASSLGADTMSAGGGGPLGDNNQGADGVGNASGDWHCDSTWMGDRVVTKSTRTWVLPSYNNHQYREIKSGSVDGSNANAYFGYSTPWGYFDFNRFHSHWSPRDWQRLINNYWGFRPRSLRVKIFNIQVKEVTVQDSTTTIANNLTSTVQVFTDDDYQLPYVVGNGTEGCLPAFPPQVFTLPQYGYATLNRDNGDNPTERSSFFCLEYFPSKMLRTGNNFEFTYSFEEVPFHCSFAPSQNLFKLANPLVDQYLYRFVSTSATGAIQFQKNLAGRYANTYKNWFPGPMGRTQGWNTSSGSSTNRVSVNNFSVSNRMNLEGASYQVNPQPNGMTNTLQGSNRYALENTMIFNAQNATPGTTSVYPEDNLLLTSESETQPVNRVAYNTGGQMATNAQNATTAPTVGTYNLQEVLPGSVWMERDVYLQGPIWAKIPETGAHFHPSPAMGGFGLKHPPPMMLIKNTPVPGNITSFSDVPVSSFITQYSTGQVTVEMEWELKKENSKRWNPEIQYTNNYNDPQFVDFAPDGSGEYRTTRAIGTRYLTRPL

SEQ ID NO: 541 - protein, 735 aa, Artificial Sequence
  source: /note="Description of Artificial Sequence: Synthetic polypeptide"
MAADGYLPDWLEDTLSEGIRQWWKLKPGPPPPKPAERHKDDSRGLVLPGYKYLGPFNGLDKGEPVNEADAAALEHDKAYDRQLDSGDNPYLKYNHADAEFQERLKEDTSFGGNLGRAVFQAKKRILEPLGLVEEPVKTAPGKKRPVEHSPAEPDSSSGTGKSGQQPARKRLNFGQTGDADSVPDPQPLGQPPAAPSGLGTNTMASGSGAPMADNNEGADGVGNSSGNWHCDSTWMGDRVITTSTRTWALPTYNNHLYKQISSQSGASNDNHYFGYSTPWGYFDFNRFHCHFSPRDWQRLINNNWGFRPKRLSFKLFNIQVKEVTQNDGTTTIANNLTSTVQVFTDSEYQLPYVLGSAHQGCLPPFPADVFMVPQYGYLTLNNGSQAVGRSSFYCLEYFPSQMLRTGNNFTFSYTFEDVPFHSSYAHSQSLDRLMNPLIDQYLYYLSRTNTPSGTTTMSRLQFSQAGASDIRDQSRNWLPGPCYRQQRVSKTAADNNNSDYSWTGATKYHLNGRDSLVNPGPAMASHKDDEEKYFPQSGVLIFGKQDSGKTNVDIEKVMITDEEEIRTTNPVATEQYGSVSTNLQSGNTQAATSDVNTQGVLPGMVWQDRDVYLQGPIWAKIPHTDGHFHPSPLMGGFGLKHPPPQILIKNTPVPANPSTTFSAAKFASFITQYSTGQVSVEIEWELQKENSKRWNPEIQYTSNYNKSVNVDFTVDTNGVYSEPRPIGTRYLTRNL

SEQ ID NO: 542 - DNA, 1797 bp, Artificial Sequence
  source: /note="Description of Artificial Sequence: Synthetic polynucleotide"
acggctccgaccggagacaagcggaaaggcgaagacgaacctcgtttgcccgacacttcttcacagactcccaagaaaaacaagaagcctcgcaaggaaagaccttccggcggggcagaagatccgggcgaaggcacctcttccaacgctggagcagcagcacccgcctctagtgtgggatcatctatcatggctgaaggaggtggcggcccagtgggcgatgcaggccagggtgccgatggagtgggcaattcctccggaaattggcattgcgattcccaatggctggaaaacggagtcgtcactcgaaccacccgaacctgggtcttgcccagctacaacaaccacctgtacaaacgaatccaaggacccagcggaggcgacaacaacaacaaattctttggattcagcaccccctggggatactttgactacaatcgattccactgccacttttccccgcgagactggcaacgactcatcaacaacaactggggcatccgtcccaaagcgatgcgctttagactctttaacatccaggttaaagaggtcacggtccaagacttcaacaccaccatcggcaacaacctcaccagtacggtccaggtctttgcggacaaggactaccaactgccgtacgtcctcggatcggctaccgaaggcaccttcccgccgttcccagcggatatctacacgatcccgcagtacgggtactgcacgctaaactacaacaacgaggcggtggatcgttcggccttctactgtctggactactttccctcagacatgctgcggacaggaaataactttgagtttacttacaccttcgaggacgttcctttccatagcatgtttgcccacaaccagacgctagaccggctgatgaatcccctcgtggatcagtacctctgggctttcagctccgtcagccaagcaggctcatctggacgagctcttcattactcgcgggcgactaaaaccaacatggcggctcaatataggaactggttacctgggcctttcttccgtgatcagcaaatctttacgggcgctagcaacatcactaaaaataacgtctttagcgtttgggaaaaaggcaagcaatgggaactcgacaatcggaccaacctaatgcagcccggtcctgcggcagcgaccacctttagcggagaacctgaccgtcaagccatgcaaaacacgctggcttttagcaggaccgtctacgatcaaacgaccgccacgaccgatcgtaaccagatactcatcaccaacgaagacgaaatcagacccaccaactcggtcggtatcgacgcgtggggagcagttcccaccaacaaccagtcgatcgtgacccccggcactcgcgcggccgtcaacaatcaaggggcgcttcccgggatggtgtggcaaaacagagacatttaccctacagggacccatttggccaaaattcccgacactgacaatcacttccatccgtccccgcttattgggcggtttggctgcaagcatccccctccccagattttcattaaaaacacacccgtccctgccaacccttcggaaacgttccagacggccaaagtggcctccttcatcaaccagtactcgaccggacagtgcaccgtcgaaatcttttgggaactcaagaaggaaacctccaagcgctggaaccccgaaatccagttcacctccaactttggcaacgcggccgacatccagtttgccgtctccgacacgggatcctattccgaacctcgtcccatcggtacccgttaccttaccaaacctctgtaa

SEQ ID NO: 543 - DNA, 1989 bp, Artificial Sequence
  source: /note="Description of Artificial Sequence: Synthetic polynucleotide"
atgaggtcgtactacgaggtcatcgttcagctgcccaacgacgtcgagagtcaggtacctggaatctccgattcgttcgtcaactggattacgtcgcgagaatggacgttgcctgaggacgccgattgggatttggaccaggtcgatcaagttcaactgacgctcggcgacaaaatccaacgggagattcgaactcattgggggacgatggccaaagaaccggactttcactattttatccaactggaacaaggtgaggtgttctttcatttacacgtcctgctggaaacgtgttccgtaaagccgatggtactcggaagatatatccgacatattcaacaaaaaattgtgagtaaagtctactgcgccacgagcctacgatggaaggatggatgcgtggtgaccaagaccaaaaatttcgggggcgcgaacaaggtccgggccgagtcgtatattcccgcctacctgatcccgaaacagcaaccggaagtgcagtgggcgtggactaacgtgcccgagtatataaaagcgtgcttgcaccgagaactgcgtgccagtctcgcgcgacttcacttcgaggaggcgggcgtctcgcaatccaaggaaaatctcgcgagaactgcagacggcgctcccgtgatgccgacccgcgtcagcaaacgctacatggagctcgtggattggctcgtggagaaggggatcaccaccgagaaggaatggctgctggaaaacagagaaagctttcggagctttcaggcctcgagcaactcggcgcgtcagatcaagacggccctgcaaggcgccattcaggagatgcttctgaccaagacggcggaggactacctcgtcggaaaggatcccgtctcggacgacgacatccgtcagaaccgcatctacaagattctggaactgaaccactacgacccagcgtacgtggggagtattttggtcgggtggtgccagaagaaatggggcaagcgaaacacgctgtggctgttcggacatgcgaccaccggcaagaccaacatcgcggaggctattgcccatgctgtgccgttctatggatgcgttaactggaccaacgagaactttccgttcaacgactgcgtcgaaaaaatgattatctggtgggaggagggcaaaatgaccgccaaagtggtggaaacagccaaggcgattctgggaggatctcgggtgagagtggaccaaaaatgcaaagcttcggttccgatcgaaccgacgccggtcattattaccagtaacaccaacatgtgttatgtcatcgacgggaacacgaccacgttcgagcataagcagccgttggaggacaggatgtttaagctcgaattgctgactcggttgcctgatgactttggtaaggtgaccaaacaggaggtgcgtcaattcttcaggtggtctcaggatcacctgacccctgtgatcccagaattcctagtgcggaaggcggagtctcgcaaaagacccgccccttccggggaaggctatataagcccgacaaagcggcccgcgctcgcagagcagcagcaggcgtcggagagcgcggacccggttcccaccaggtatcgtatcaaatgctcgaaacattgcggtatggataaaatgttgtttccttgccaaatttgtgaatcgatgaacagagatattaatatttgtgctattcataaaacgaccgactgtaaagagtgtttccccgactacggggataaagatgatgtagaactacccccctgtacagaacacaacgtgtctcgttgttatcaatgtcattcgggcgaattgtatcgcgtgacttcggactctgacgagaaacctgcccccgagagtgatgaaggcaccgagccatcctatgctccctgcacgattcaccacctgatgggcaagagtcacgggttagtcacttgcgcggcgtgtcggttgaaaaatagtacgttgcatgatgacttggatgacggtgatctcgaacaataa

SEQ ID NO: 544 - DNA, 1626 bp, Artificial Sequence
  source: /note="Description of Artificial Sequence: Synthetic polynucleotide"
atgaggtcgtactacgaggtcatcgttcagctgcccaacgacgtcgagagtcaggtacctggaatctccgattcgttcgtcaactggattacgtcgcgagaatggacgttgcctgaggacgccgattgggatttggaccaggtcgatcaagttcaactgacgctcggcgacaaaatccaacgggagattcgaactcattgggggacgatggccaaagaaccggactttcactattttatccaactggaacaaggtgaggtgttctttcatttacacgtcctgctggaaacgtgttccgtaaagccgatggtactcggaagatatatccgacatattcaacaaaaaattgtgagtaaagtctactgcgccacgagcctacgatggaaggatggatgcgtggtgaccaagaccaaaaatttcgggggcgcgaacaaggtccgggccgagtcgtatattcccgcctacctgatcccgaaacagcaaccggaagtgcagtgggcgtggactaacgtgcccgagtatataaaagcgtgcttgcaccgagaactgcgtgccagtctcgcgcgacttcacttcgaggaggcgggcgtctcgcaatccaaggaaaatctcgcgagaactgcagacggcgctcccgtgatgccgacccgcgtcagcaaacgctacatggagctcgtggattggctcgtggagaaggggatcaccaccgagaaggaatggctgctggaaaacagagaaagctttcggagctttcaggcctcgagcaactcggcgcgtcagatcaagacggccctgcaaggcgccattcaggagatgcttctgaccaagacggcggaggactacctcgtcggaaaggatcccgtctcggacgacgacatccgtcagaaccgcatctacaagattctggaactgaaccactacgacccagcgtacgtggggagtattttggtcgggtggtgccagaagaaatggggcaagcgaaacacgctgtggctgttcggacatgcgaccaccggcaagaccaacatcgcggaggctattgcccatgctgtgccgttctatggatgcgttaactggaccaacgagaactttccgttcaacgactgcgtcgaaaaaatgattatctggtgggaggagggcaaaatgaccgccaaagtggtggaaacagccaaggcgattctgggaggatctcgggtgagagtggaccaaaaatgcaaagcttcggttccgatcgaaccgacgccggtcattattaccagtaacaccaacatgtgttatgtcatcgacgggaacacgaccacgttcgagcataagcagccgttggaggacaggatgtttaagctcgaattgctgactcggttgcctgatgactttggtaaggtgaccaaacaggaggtgcgtcaattcttcaggtggtctcaggatcacctgacccctgtgatcccagaattcctagtgcggaaggcggagtctcgcaaaagacccgccccttccggggaaggctatataagcccgacaaagcggcccgcgctcgcagagcagcagcaggcgtcggagagcgcggacccggttcccaccagattggttggagcggttggtcaaaaagggagtgaatgctgcagctga

SEQ ID NO: 545 - DNA, 1323 bp, Artificial Sequence
  source: /note="Description of Artificial Sequence: Synthetic polynucleotide"
atggagctcgtggattggctcgtggagaaggggatcaccaccgagaaggaatggctgctggaaaacagagaaagctttcggagctttcaggcctcgagcaactcggcgcgtcagatcaagacggccctgcaaggcgccattcaggagatgcttctgaccaagacggcggaggactacctcgtcggaaaggatcccgtctcggacgacgacatccgtcagaaccgcatctacaagattctggaactgaaccactacgacccagcgtacgtggggagtattttggtcgggtggtgccagaagaaatggggcaagcgaaacacgctgtggctgttcggacatgcgaccaccggcaagaccaacatcgcggaggctattgcccatgctgtgccgttctatggatgcgttaactggaccaacgagaactttccgttcaacgactgcgtcgaaaaaatgattatctggtgggaggagggcaaaatgaccgccaaagtggtggaaacagccaaggcgattctgggaggatctcgggtgagagtggaccaaaaatgcaaagcttcggttccgatcgaaccgacgccggtcattattaccagtaacaccaacatgtgttatgtcatcgacgggaacacgaccacgttcgagcataagcagccgttggaggacaggatgtttaagctcgaattgctgactcggttgcctgatgactttggtaaggtgaccaaacaggaggtgcgtcaattcttcaggtggtctcaggatcacctgacccctgtgatcccagaattcctagtgcggaaggcggagtctcgcaaaagacccgccccttccggggaaggctatataagcccgacaaagcggcccgcgctcgcagagcagcagcaggcgtcggagagcgcggacccggttcccaccaggtatcgtatcaaatgctcgaaacattgcggtatggataaaatgttgtttccttgccaaatttgtgaatcgatgaacagagatattaatatttgtgctattcataaaacgaccgactgtaaagagtgtttccccgactacggggataaagatgatgtagaactacccccctgtacagaacacaacgtgtctcgttgttatcaatgtcattcgggcgaattgtatcgcgtgacttcggactctgacgagaaacctgcccccgagagtgatgaaggcaccgagccatcctatgctccctgcacgattcaccacctgatgggcaagagtcacgggttagtcacttgcgcggcgtgtcggttgaaaaatagtacgttgcatgatgacttggatgacggtgatctcgaacaataa

SEQ ID NO: 546 - DNA, 960 bp, Artificial Sequence
  source: /note="Description of Artificial Sequence: Synthetic polynucleotide"
atggagctcgtggattggctcgtggagaaggggatcaccaccgagaaggaatggctgctggaaaacagagaaagctttcggagctttcaggcctcgagcaactcggcgcgtcagatcaagacggccctgcaaggcgccattcaggagatgcttctgaccaagacggcggaggactacctcgtcggaaaggatcccgtctcggacgacgacatccgtcagaaccgcatctacaagattctggaactgaaccactacgacccagcgtacgtggggagtattttggtcgggtggtgccagaagaaatggggcaagcgaaacacgctgtggctgttcggacatgcgaccaccggcaagaccaacatcgcggaggctattgcccatgctgtgccgttctatggatgcgttaactggaccaacgagaactttccgttcaacgactgcgtcgaaaaaatgattatctggtgggaggagggcaaaatgaccgccaaagtggtggaaacagccaaggcgattctgggaggatctcgggtgagagtggaccaaaaatgcaaagcttcggttccgatcgaaccgacgccggtcattattaccagtaacaccaacatgtgttatgtcatcgacgggaacacgaccacgttcgagcataagcagccgttggaggacaggatgtttaagctcgaattgctgactcggttgcctgatgactttggtaaggtgaccaaacaggaggtgcgtcaattcttcaggtggtctcaggatcacctgacccctgtgatcccagaattcctagtgcggaaggcggagtctcgcaaaagacccgccccttccggggaaggctatataagcccgacaaagcggcccgcgctcgcagagcagcagcaggcgtcggagagcgcggacccggttcccaccagattggttggagcggttggtcaaaaagggagtgaatgctgcagctga

SEQ ID NO: 547 - DNA, 1608 bp, Artificial Sequence
  source: /note="Description of Artificial Sequence: Synthetic polynucleotide"
atggctgaaggaggtggcggcccagtgggcgatgcaggccagggtgccgatggagtgggcaattcctccggaaattggcattgcgattcccaatggctggaaaacggagtcgtcactcgaaccacccgaacctgggtcttgcccagctacaacaaccacctgtacaaacgaatccaaggacccagcggaggcgacaacaacaacaaattctttggattcagcaccccctggggatactttgactacaatcgattccactgccacttttccccgcgagactggcaacgactcatcaacaacaactggggcatccgtcccaaagcgatgcgctttagactctttaacatccaggttaaagaggtcacggtccaagacttcaacaccaccatcggcaacaacctcaccagtacggtccaggtctttgcggacaaggactaccaactgccgtacgtcctcggatcggctaccgaaggcaccttcccgccgttcccagcggatatctacacgatcccgcagtacgggtactgcacgctaaactacaacaacgaggcggtggatcgttcggccttctactgtctggactactttccctcagacatgctgcggacaggaaataactttgagtttacttacaccttcgaggacgttcctttccatagcatgtttgcccacaaccagacgctagaccggctgatgaatcccctcgtggatcagtacctctgggctttcagctccgtcagccaagcaggctcatctggacgagctcttcattactcgcgggcgactaaaaccaacatggcggctcaatataggaactggttacctgggcctttcttccgtgatcagcaaatctttacgggcgctagcaacatcactaaaaataacgtctttagcgtttgggaaaaaggcaagcaatgggaactcgacaatcggaccaacctaatgcagcccggtcctgcggcagcgaccacctttagcggagaacctgaccgtcaagccatgcaaaacacgctggcttttagcaggaccgtctacgatcaaacgaccgccacgaccgatcgtaaccagatactcatcaccaacgaagacgaaatcagacccaccaactcggtcggtatcgacgcgtggggagcagttcccaccaacaaccagtcgatcgtgacccccggcactcgcgcggccgtcaacaatcaaggggcgcttcccgggatggtgtggcaaaacagagacatttaccctacagggacccatttggccaaaattcccgacactgacaatcacttccatccgtccccgcttattgggcggtttggctgcaagcatccccctccccagattttcattaaaaacacacccgtccctgccaacccttcggaaacgttccagacggccaaagtggcctccttcatcaaccagtactcgaccggacagtgcaccgtcgaaatcttttgggaactcaagaaggaaacctccaagcgctggaaccccgaaatccagttcacctccaactttggcaacgcggccgacatccagtttgccgtctccgacacgggatcctattccgaacctcgtcccatcggtacccgttaccttaccaaacctctgtaa

SEQ ID NO: 548 - DNA, 2232 bp, Artificial Sequence
  source: /note="Description of Artificial Sequence: Synthetic polynucleotide"
atgtctctcatttctgatgcgattccagattggttggagcggttggtcaaaaagggagtgaatgctgcagctgatttctaccatttggaaagcggtcctcctcgtcctaaggcaaatcagcaaactcaagaatctcttgaaaaggacgattcgagaggtctcgtgttcccaggctacaattatctaggccctttcaacggtctagataaaggagaacccgtcaacgaggcagacgctgccgccttagaacacgacaaggcttacgacctcgaaatcaaggacgggcacaacccgtactttgagtacaacgaggccgacagacgtttccaggaacgtctcaaagacgatacctcctttggaggcaatttaggtaaagccatcttccaggccaaaaagagggttctcgaaccctttggtctggtggaagactcaaagacggctccgaccggagacaagcggaaaggcgaagacgaacctcgtttgcccgacacttcttcacagactcccaagaaaaacaagaagcctcgcaaggaaagaccttccggcggggcagaagatccgggcgaaggcacctcttccaacgctggagcagcagcacccgcctctagtgtgggatcatctatcatggctgaaggaggtggcggcccagtgggcgatgcaggccagggtgccgatggagtgggcaattcctccggaaattggcattgcgattcccaatggctggaaaacggagtcgtcactcgaaccacccgaacctgggtcttgcccagctacaacaaccacctgtacaaacgaatccaaggacccagcggaggcgacaacaacaacaaattctttggattcagcaccccctggggatactttgactacaatcgattccactgccacttttccccgcgagactggcaacgactcatcaacaacaactggggcatccgtcccaaagcgatgcgctttagactctttaacatccaggttaaagaggtcacggtccaagacttcaacaccaccatcggcaacaacctcaccagtacggtccaggtctttgcggacaaggactaccaactgccgtacgtcctcggatcggctaccgaaggcaccttcccgccgttcccagcggatatctacacgatcccgcagtacgggtactgcacgctaaactacaacaacgaggcggtggatcgttcggccttctactgtctggactactttccctcagacatgctgcggacaggaaataactttgagtttacttacaccttcgaggacgttcctttccatagcatgtttgcccacaaccagacgctagaccggctgatgaatcccctcgtggatcagtacctctgggctttcagctccgtcagccaagcaggctcatctggacgagctcttcattactcgcgggcgactaaaaccaacatggcggctcaatataggaactggttacctgggcctttcttccgtgatcagcaaatctttacgggcgctagcaacatcactaaaaataacgtctttagcgtttgggaaaaaggcaagcaatgggaactcgacaatcggaccaacctaatgcagcccggtcctgcggcagcgaccacctttagcggagaacctgaccgtcaagccatgcaaaacacgctggcttttagcaggaccgtctacgatcaaacgaccgccacgaccgatcgtaaccagatactcatcaccaacgaagacgaaatcagacccaccaactcggtcggtatcgacgcgtggggagcagttcccaccaacaaccagtcgatcgtgacccccggcactcgcgcggccgtcaacaatcaaggggcgcttcccgggatggtgtggcaaaacagagacatttaccctacagggacccatttggccaaaattcccgacactgacaatcacttccatccgtccccgcttattgggcggtttggctgcaagcatccccctccccagattttcattaaaaacacacccgtccctgccaacccttcggaaacgttccagacggccaaagtggcctccttcatcaaccagtactcgaccggacagtgcaccgtcgaaatcttttgggaactcaagaaggaaacctccaagcgctggaaccccgaaatccagttcacctccaactttggcaacgcggccgacatccagtttgccgtctccgacacgggatcctattccgaacctcgtcccatcggtacccgttaccttaccaaacctctgtaa

SEQ ID NO: 549 - protein, 535 aa, Artificial Sequence
  source: /note="Description of Artificial Sequence: Synthetic polypeptide"
MAEGGGGPVGDAGQGADGVGNSSGNWHCDSQWLENGVVTRTTRTWVLPSYNNHLYKRIQGPSGGDNNNKFFGFSTPWGYFDYNRFHCHFSPRDWQRLINNNWGIRPKAMRFRLFNIQVKEVTVQDFNTTIGNNLTSTVQVFADKDYQLPYVLGSATEGTFPPFPADIYTIPQYGYCTLNYNNEAVDRSAFYCLDYFPSDMLRTGNNFEFTYTFEDVPFHSMFAHNQTLDRLMNPLVDQYLWAFSSVSQAGSSGRALHYSRATKTNMAAQYRNWLPGPFFRDQQIFTGASNITKNNVFSVWEKGKQWELDNRTNLMQPGPAAATTFSGEPDRQAMQNTLAFSRTVYDQTTATTDRNQILITNEDEIRPTNSVGIDAWGAVPTNNQSIVTPGTRAAVNNQGALPGMVWQNRDIYPTGTHLAKIPDTDNHFHPSPLIGRFGCKHPPPQIFIKNTPVPANPSETFQTAKVASFINQYSTGQCTVEIFWELKKETSKRWNPEIQFTSNFGNAADIQFAVSDTGSYSEPRPIGTRYLTKPL

SEQ ID NO: 550 - protein, 440 aa, Artificial Sequence
  source: /note="Description of Artificial Sequence: Synthetic polypeptide"
MELVDWLVEKGITTEKEWLLENRESFRSFQASSNSARQIKTALQGAIQEMLLTKTAEDYLVGKDPVSDDDIRQNRIYKILELNHYDPAYVGSILVGWCQKKWGKRNTLWLFGHATTGKTNIAEAIAHAVPFYGCVNWTNENFPFNDCVEKMIIWWEEGKMTAKVVETAKAILGGSRVRVDQKCKASVPIEPTPVIITSNTNMCYVIDGNTTTFEHKQPLEDRMFKLELLTRLPDDFGKVTKQEVRQFFRWSQDHLTPVIPEFLVRKAESRKRPAPSGEGYISPTKRPALAEQQQASESADPVPTRYRIKCSKHCGMDKMLFPCQICESMNRDINICAIHKTTDCKECFPDYGDKDDVELPPCTEHNVSRCYQCHSGELYRVTSDSDEKPAPESDEGTEPSYAPCTIHHLMGKSHGLVTCAACRLKNSTLHDDLDDGDLEQ

SEQ ID NO: 551 - protein, 319 aa, Artificial Sequence
  source: /note="Description of Artificial Sequence: Synthetic polypeptide"
MELVDWLVEKGITTEKEWLLENRESFRSFQASSNSARQIKTALQGAIQEMLLTKTAEDYLVGKDPVSDDDIRQNRIYKILELNHYDPAYVGSILVGWCQKKWGKRNTLWLFGHATTGKTNIAEAIAHAVPFYGCVNWTNENFPFNDCVEKMIIWWEEGKMTAKVVETAKAILGGSRVRVDQKCKASVPIEPTPVIITSNTNMCYVIDGNTTTFEHKQPLEDRMFKLELLTRLPDDFGKVTKQEVRQFFRWSQDHLTPVIPEFLVRKAESRKRPAPSGEGYISPTKRPALAEQQQASESADPVPTRLVGAVGQKGSECCS

SEQ ID NO: 552 - protein, 662 aa, Artificial Sequence
  source: /note="Description of Artificial Sequence: Synthetic polypeptide"
MRSYYEVIVQLPNDVESQVPGISDSFVNWITSREWTLPEDADWDLDQVDQVQLTLGDKIQREIRTHWGTMAKEPDFHYFIQLEQGEVFFHLHVLLETCSVKPMVLGRYIRHIQQKIVSKVYCATSLRWKDGCVVTKTKNFGGANKVRAESYIPAYLIPKQQPEVQWAWTNVPEYIKACLHRELRASLARLHFEEAGVSQSKENLARTADGAPVMPTRVSKRYMELVDWLVEKGITTEKEWLLENRESFRSFQASSNSARQIKTALQGAIQEMLLTKTAEDYLVGKDPVSDDDIRQNRIYKILELNHYDPAYVGSILVGWCQKKWGKRNTLWLFGHATTGKTNIAEAIAHAVPFYGCVNWTNENFPFNDCVEKMIIWWEEGKMTAKVVETAKAILGGSRVRVDQKCKASVPIEPTPVIITSNTNMCYVIDGNTTTFEHKQPLEDRMFKLELLTRLPDDFGKVTKQEVRQFFRWSQDHLTPVIPEFLVRKAESRKRPAPSGEGYISPTKRPALAEQQQASESADPVPTRYRIKCSKHCGMDKMLFPCQICESMNRDINICAIHKTTDCKECFPDYGDKDDVELPPCTEHNVSRCYQCHSGELYRVTSDSDEKPAPESDEGTEPSYAPCTIHHLMGKSHGLVTCAACRLKNSTLHDDLDDGDLEQ

SEQ ID NO: 553 - protein, 541 aa, Artificial Sequence
  source: /note="Description of Artificial Sequence: Synthetic polypeptide"
MRSYYEVIVQLPNDVESQVPGISDSFVNWITSREWTLPEDADWDLDQVDQVQLTLGDKIQREIRTHWGTMAKEPDFHYFIQLEQGEVFFHLHVLLETCSVKPMVLGRYIRHIQQKIVSKVYCATSLRWKDGCVVTKTKNFGGANKVRAESYIPAYLIPKQQPEVQWAWTNVPEYIKACLHRELRASLARLHFEEAGVSQSKENLARTADGAPVMPTRVSKRYMELVDWLVEKGITTEKEWLLENRESFRSFQASSNSARQIKTALQGAIQEMLLTKTAEDYLVGKDPVSDDDIRQNRIYKILELNHYDPAYVGSILVGWCQKKWGKRNTLWLFGHATTGKTNIAEAIAHAVPFYGCVNWTNENFPFNDCVEKMIIWWEEGKMTAKVVETAKAILGGSRVRVDQKCKASVPIEPTPVIITSNTNMCYVIDGNTTTFEHKQPLEDRMFKLELLTRLPDDFGKVTKQEVRQFFRWSQDHLTPVIPEFLVRKAESRKRPAPSGEGYISPTKRPALAEQQQASESADPVPTRLVGAVGQKGSECCS

SEQ ID NO: 554 - protein, 743 aa, Artificial Sequence
  source: /note="Description of Artificial Sequence: Synthetic polypeptide"
MSLISDAIPDWLERLVKKGVNAAADFYHLESGPPRPKANQQTQESLEKDDSRGLVFPGYNYLGPFNGLDKGEPVNEADAAALEHDKAYDLEIKDGHNPYFEYNEADRRFQERLKDDTSFGGNLGKAIFQAKKRVLEPFGLVEDSKTAPTGDKRKGEDEPRLPDTSSQTPKKNKKPRKERPSGGAEDPGEGTSSNAGAAAPASSVGSSIMAEGGGGPVGDAGQGADGVGNSSGNWHCDSQWLENGVVTRTTRTWVLPSYNNHLYKRIQGPSGGDNNNKFFGFSTPWGYFDYNRFHCHFSPRDWQRLINNNWGIRPKAMRFRLFNIQVKEVTVQDFNTTIGNNLTSTVQVFADKDYQLPYVLGSATEGTFPPFPADIYTIPQYGYCTLNYNNEAVDRSAFYCLDYFPSDMLRTGNNFEFTYTFEDVPFHSMFAHNQTLDRLMNPLVDQYLWAFSSVSQAGSSGRALHYSRATKTNMAAQYRNWLPGPFFRDQQIFTGASNITKNNVFSVWEKGKQWELDNRTNLMQPGPAAATTFSGEPDRQAMQNTLAFSRTVYDQTTATTDRNQILITNEDEIRPTNSVGIDAWGAVPTNNQSIVTPGTRAAVNNQGALPGMVWQNRDIYPTGTHLAKIPDTDNHFHPSPLIGRFGCKHPPPQIFIKNTPVPANPSETFQTAKVASFINQYSTGQCTVEIFWELKKETSKRWNPEIQFTSNFGNAADIQFAVSDTGSYSEPRPIGTRYLTKPL

SEQ ID NO: 555 - protein, 598 aa, Artificial Sequence
  source: /note="Description of Artificial Sequence: Synthetic polypeptide"
TAPTGDKRKGEDEPRLPDTSSQTPKKNKKPRKERPSGGAEDPGEGTSSNAGAAAPASSVGSSIMAEGGGGPVGDAGQGADGVGNSSGNWHCDSQWLENGVVTRTTRTWVLPSYNNHLYKRIQGPSGGDNNNKFFGFSTPWGYFDYNRFHCHFSPRDWQRLINNNWGIRPKAMRFRLFNIQVKEVTVQDFNTTIGNNLTSTVQVFADKDYQLPYVLGSATEGTFPPFPADIYTIPQYGYCTLNYNNEAVDRSAFYCLDYFPSDMLRTGNNFEFTYTFEDVPFHSMFAHNQTLDRLMNPLVDQYLWAFSSVSQAGSSGRALHYSRATKTNMAAQYRNWLPGPFFRDQQIFTGASNITKNNVFSVWEKGKQWELDNRTNLMQPGPAAATTFSGEPDRQAMQNTLAFSRTVYDQTTATTDRNQILITNEDEIRPTNSVGIDAWGAVPTNNQSIVTPGTRAAVNNQGALPGMVWQNRDIYPTGTHLAKIPDTDNHFHPSPLIGRFGCKHPPPQIFIKNTPVPANPSETFQTAKVASFINQYSTGQCTVEIFWELKKETSKRWNPEIQFTSNFGNAADIQFAVSDTGSYSEPRPIGTRYLTKPL

SEQ ID NO: 556 - DNA, 4694 bp, Artificial Sequence
  source: /note="Description of Artificial Sequence: Synthetic polynucleotide"
tggccagtttccaagacaggctcgctcgctcactcgggccggggccccaaaggggcccctagcgaccgcttcgcggtcgcggcccgagtgagcgagcgagcctgtcttggaaactggccagcactccggtgaggtaatgccgtcacgtggtcgggaatgggaacgggaaatctcgcgagaacgtaaacaaatataagacggcgccacacggcgctgcgtcatacgcgcgcgcgcaccggcgagatgaggtcgtactacgaggtcatcgttcagctgcccaacgacgtcgagagtcaggtacctggaatctccgattcgttcgtcaactggattacgtcgcgagaatggacgttgcctgaggacgccgattgggatttggaccaggtcgatcaagttcaactgacgctcggcgacaaaatccaacgggagattcgaactcattgggggacgatggccaaagaaccggactttcactattttatccaactggaacaaggtgaggtgttctttcatttacacgtcctgctggaaacgtgttccgtaaagccgatggtactcggaagatatatccgacatattcaacaaaaaattgtgagtaaagtctactgcgccacgagcctacgatggaaggatggatgcgtggtgaccaagaccaaaaatttcgggggcgcgaacaaggtccgggccgagtcgtatattcccgcctacctgatcccgaaacagcaaccggaagtgcagtgggcgtggactaacgtgcccgagtatataaaagcgtgcttgcaccgagaactgcgtgccagtctcgcgcgacttcacttcgaggaggcgggcgtctcgcaatccaaggaaaatctcgcgagaactgcagacggcgctcccgtgatgccgacccgcgtcagcaaacgctacatggagctcgtggattggctcgtggagaaggggatcaccaccgagaaggaatggctgctggaaaacagagaaagctttcggagctttcaggcctcgagcaactcggcgcgtcagatcaagacggccctgcaaggcgccattcaggagatgcttctgaccaagacggcggaggactacctcgtcggaaaggatcccgtctcggacgacgacatccgtcagaaccgcatctacaagattctggaactgaaccactacgacccagcgtacgtggggagtattttggtcgggtggtgccagaagaaatggggcaagcgaaacacgctgtggctgttcggacatgcgaccaccggcaagaccaacatcgcggaggctattgcccatgctgtgccgttctatggatgcgttaactggaccaacgagaactttccgttcaacgactgcgtcgaaaaaatgattatctggtgggaggagggcaaaatgaccgccaaagtggtggaaacagccaaggcgattctgggaggatctcgggtgagagtggaccaaaaatgcaaagcttcggttccgatcgaaccgacgccggtcattattaccagtaacaccaacatgtgttatgtcatcgacgggaacacgaccacgttcgagcataagcagccgttggaggacaggatgtttaagctcgaattgctgactcggttgcctgatgactttggtaaggtgaccaaacaggaggtgcgtcaattcttcaggtggtctcaggatcacctgacccctgtgatcccagaattcctagtgcggaaggcggagtctcgcaaaagacccgccccttccggggaaggctatataagcccgacaaagcggcccgcgctcgcagagcagcagcaggcgtcggagagcgcggacccggttcccaccaggtatcgtatcaaatgctcgaaacattgcggtatggataaaatgttgtttccttgccaaatttgtgaatcgatgaacagagatattaatatttgtgctattcataaaacgaccgactgtaaagagtgtttccccgactacggggataaagatgatgtagaactacccccctgtacagaacacaacgtgtctcgttgttatcaatgtcattcgggcgaattgtatcgcgtgacttcggactctgacgagaaacctgcccccgagagtgatgaaggcaccgagccatcctatgctccctgcacgattcaccacctgatgggcaagagtcacgggttagtcacttgcgcggcgtgtcggttgaaaaatagtacgttgcatgatgacttggatgacggtgatctcgaacaataaatgattgaaatgtagccatgtctctcatttctgatgcgattccagattggttggagcggttggtcaaaaagggagtgaatgctgcagctgatttctaccatttggaaagcggtcctcctcgtcctaaggcaaatcagcaaactcaagaatctcttgaaaaggacgattcgagaggtctcgtgttcccaggctacaattatctaggccctttcaacggtctagataaaggagaacccgtcaacgaggcagacgctgccgccttagaacacgacaaggcttacgacctcgaaatcaaggacgggcacaacccgtactttgagtacaacgaggccgacagacgtttccaggaacgtctcaaagacgatacctcctttggaggcaatttaggtaaagccatcttccaggccaaaaagagggttctcgaaccctttggtctggtggaagactcaaagacggctccgaccggagacaagcggaaaggcgaagacgaacctcgtttgcccgacacttcttcacagactcccaagaaaaacaagaagcctcgcaaggaaagaccttccggcggggcagaagatccgggcgaaggcacctcttccaacgctggagcagcagcacccgcctctagtgtgggatcatctatcatggctgaaggaggtggcggcccagtgggcgatgcaggccagggtgccgatggagtgggcaattcctccggaaattggcattgcgattcccaatggctggaaaacggagtcgtcactcgaaccacccgaacctgggtcttgcccagctacaacaaccacctgtacaaacgaatccaaggacccagcggaggcgacaacaacaacaaattctttggattcagcaccccctggggatactttgactacaatcgattccactgccacttttccccgcgagactggcaacgactcatcaacaacaactggggcatccgtcccaaagcgatgcgctttagactctttaacatccaggttaaagaggtcacggtccaagacttcaacaccaccatcggcaacaacctcaccagtacggtccaggtctttgcggacaaggactaccaactgccgtacgtcctcggatcggctaccgaaggcaccttcccgccgttcccagcggatatctacacgatcccgcagtacgggtactgcacgctaaactacaacaacgaggcggtggatcgttcggccttctactgtctggactactttccctcagacatgctgcggacaggaaataactttgagtttacttacaccttcgaggacgttcctttccatagcatgtttgcccacaaccagacgctagaccggctgatgaatcccctcgtggatcagtacctctgggctttcagctccgtcagccaagcaggctcatctggacgagctcttcattactcgcgggcgactaaaaccaacatggcggctcaatataggaactggttacctgggcctttcttccgtgatcagcaaatctttacgggcgctagcaacatcactaaaaataacgtctttagcgtttgggaaaaaggcaagcaatgggaactcgacaatcggaccaacctaatgcagcccggtcctgcggcagcgaccacctttagcggagaacctgaccgtcaagccatgcaaaacacgctggcttttagcaggaccgtctacgatcaaacgaccgccacgaccgatcgtaaccagatactcatcaccaacgaagacgaaatcagacccaccaactcggtcggtatcgacgcgtggggagcagttcccaccaacaaccagtcgatcgtgacccccggcactcgcgcggccgtcaacaatcaaggggcgcttcccgggatggtgtggcaaaacagagacatttaccctacagggacccatttggccaaaattcccgacactgacaatcacttccatccgtccccgcttattgggcggtttggctgcaagcatccccctccccagattttcattaaaaacacacccgtccctgccaacccttcggaaacgttccagacggccaaagtggcctccttcatcaaccagtactcgaccggacagtgcaccgtcgaaatcttttgggaactcaagaaggaaacctccaagcgctggaaccccgaaatccagttcacctccaactttggcaacgcggccgacatccagtttgccgtctccgacacgggatcctattccgaacctcgtcccatcggtacccgttaccttaccaaacctctgtaaattaaacccttcaataaaccgtttatgcgtaactgtatttccgtctcctgtcgttattcagtcacatgatgcggcattacctcaccggagtgctggccagtttccaagacaggctcgctcgctcactcgggccggggccccaaaggggcccctagcgaccgcttcgcggtcgcggcccgagtgagcgagcgagcctgtcttggaaactggcca

SEQ ID NO: 557 - DNA, 2211 bp, Artificial Sequence
  source: /note="Description of Artificial Sequence: Synthetic polynucleotide"
atggctgctgatggttatcttccagattggctcgaggacactctctctgaaggaataagacagtggtggaagctcaaacctggcccaccaccaccaaagcccgcagagcggcataaggacgacagcaggggtcttgtgcttcctgggtacaagtacctcggacccttcaacggactcgacaagggagagccggtcaacgaggcagacgcagcggccctcgagcacgacaaggcctacgaccagcagctcaaggccggtgacaacccctacctcaagtacaaccacgccgacgcggagttccagcagcggcttcagggcgacacatcgtttgggggcaacctcggcagagcagtcttccaggccaaaaagagggttcttgaacctcttggtctggttgagcaagcgggtgagacggctcctggaaagaagagaccgttgattgaatccccccagcagcccgactcctccacgggtatcggcaaaaaaggcaagcagccggctaaaaagagactcaattttggtcagactggcgactcagagtcagtccccgacccacaacctctcggagaacctccagcaacccccgctgctgtgggacctactacaatggcttcaggtggtggcgcaccaatggcagacaataacgaaggcgccgacggagtgggtaatgcctcaggaaattggcattgcgattccacatggctgggcgacagagtcatcaccaccagcacccgcacctgggccttgcccacctacaataaccacctctacaagcaaatctccagtgcttcaacgggggccagcaacgacaaccactacttcggctacagcaccccctgggggtattttgacttcaacagattccactgccacttttcaccacgtgactggcagcgactcatcaacaacaattggggattccggcccaagagactcaacttcaaactcttcaacatccaagtcaaggaggtcacgacgaatgatggcgtcacaaccatcgctaataaccttaccagcacggttcaagtcttctcggactcagactatcagctcccgtacgtgctcgggtcggctcacgagggctgcctcccgccgttcccagcagacgtcttcatggtgccacagtatggatacctcaccctgaacaacgggagtcaggcagtaggacgctcttcattttactgcctggagtactttccttctcagatgctgcgtaccggaaacaactttaccttcagctacacttttgaggacgttcctttccacagcagctacgctcacagccagagtctggaccgtctcatgaatcctctcatcgaccagtacctgtattacctgaacagaactcagaatcagtccggaagtgcccaaaacaaggacttgctgtttagccgggggtctccagctggcatgtctgttcagcccaaaaactggctacctggaccctgttatcggcagcagcgcgtttctaaaacaaaaacagacaacaacaacagcaactttacctggactggtgcttcaaaatataaccttaatgggcgtgaatctataatcaaccctggcactgctatggcctcacacaaagacgacaaagacaagttctttcccatgagcggtgtcatgatttttggaaaggagagcgccggagcttcaaacactgcattggacaatgtcatgatcacagacgaagaggaaatcaaagccactaaccccgtggccaccgaaagatttgggactgtggcagtcaatctccagagcagcagcacagaccctgcgaccggagatgtgcatgttatgggagccttacctggaatggtgtggcaagacagagacgtatacctgcagggtcccatttgggccaaaattcctcacacagatggacactttcacccgtctcctcttatgggcggctttggactcaagaacccgcctcctcagatcctcatcaaaaacacgcctgttcctgcgaatcctccggcggagttttcagctacaaagtttgcttcattcatcacccaatactccacaggacaagtgagtgtggaaattgaatgggagctgcagaaagaaaacagcaagcgctggaatcccgaagtgcagtacacatccaattatgcaaaatctgccaacgttgattttactgtggacaacaatggactttatactgagcctcgccccattggcacccgttacctcacccgtcccctgtaa

SEQ ID NO: 558 - protein, 736 aa, Artificial Sequence
  source: /note="Description of Artificial Sequence: Synthetic polypeptide"
MAADGYLPDWLEDTLSEGIRQWWKLKPGPPPPKPAERHKDDSRGLVLPGYKYLGPFNGLDKGEPVNEADAAALEHDKAYDQQLKAGDNPYLKYNHADAEFQQRLQGDTSFGGNLGRAVFQAKKRVLEPLGLVEQAGETAPGKKRPLIESPQQPDSSTGIGKKGKQPAKKRLNFGQTGDSESVPDPQPLGEPPATPAAVGPTTMASGGGAPMADNNEGADGVGNASGNWHCDSTWLGDRVITTSTRTWALPTYNNHLYKQISSASTGASNDNHYFGYSTPWGYFDFNRFHCHFSPRDWQRLINNNWGFRPKRLNFKLFNIQVKEVTTNDGVTTIANNLTSTVQVFSDSDYQLPYVLGSAHEGCLPPFPADVFMVPQYGYLTLNNGSQAVGRSSFYCLEYFPSQMLRTGNNFTFSYTFEDVPFHSSYAHSQSLDRLMNPLIDQYLYYLNRTQNQSGSAQNKDLLFSRGSPAGMSVQPKNWLPGPCYRQQRVSKTKTDNNNSNFTWTGASKYNLNGRESIINPGTAMASHKDDKDKFFPMSGVMIFGKESAGASNTALDNVMITDEEEIKATNPVATERFGTVAVNLQSSSTDPATGDVHVMGALPGMVWQDRDVYLQGPIWAKIPHTDGHFHPSPLMGGFGLKNPPPQILIKNTPVPANPPAEFSATKFASFITQYSTGQVSVEIEWELQKENSKRWNPEVQYTSNYAKSANVDFTVDNNGLYTEPRPIGTRYLTRPL

SEQ ID NO: 559 - DNA, 2211 bp, Artificial Sequence
  source: /note="Description of Artificial Sequence: Synthetic polynucleotide"
atggcttccgatggttatcttccagattggctcgaggacaacctctctgagggcatccgcgagtggtgggacttgaaacctggagccccgaaacccaaagccaaccagcaaaagcaggacgacggccggggtctggtgcttcctggctacaagtacctcggacccttcaacggactcgacaagggggagcccgtcaacgcggcggatgcagcggccctcgagcacgacaaggcctacgaccagcagctcagagcgggtgacaatccgtacctgcggtataaccacgccgacgccgagtttcaggagcgtctgcaagaagatacgtcttttgggggcaacctcgggcgagcagtcttccaggccaagaagagggttctcgaaccttttggtctggttgaggaaggtgctaagacggctcctggaaagaaacgtccggtagagcagtcgccacaagagccagactcctcctcgggcattggcaagacaggccagcagcccgctaaaaagagactcaattttggtcagactggcgactcagagtcagtccccgacccacaacctctcggagaacctccagcaacccccgctgctgtgggacctactacaatggcttcaggcggtggcgcaccaatggcagacaataacgaaggcgccgacggagtgggtaatgcctcaggaaattggcattgcgattccacatggctgggcgacagagtcatcaccaccagcacccgaacatgggccttgcccacctataacaaccacctctacaagcaaatctccagtgcttcaacgggggccagcaacgacaaccactacttcggctacagcaccccctgggggtattttgatttcaacagattccactgccatttctcaccacgtgactggcagcgactcatcaacaacaattggggattccggcccaagagactcaacttcaaactcttcaacatccaagtcaaggaggtcacgacgaatgatggcgtcacaaccatcgctaataaccttaccagcacggttcaagtcttctcggactcggagtaccagcttccgtacgtcctcggctctgcgcaccagggctgcctccctccgttcccggcggacgtgttcatgattccgcagtacggctacctaacgctcaacaatggcagccaggcagtgggacggtcatccttttactgcctggaatatttcccatcgcagatgctgagaacgggcaataactttaccttcagctacaccttcgaggacgtgcctttccacagcagctacgcgcacagccagagcctggaccggctgatgaatcctctcatcgaccagtacctgtattacctgaacagaactcagaatcagtccggaagtgcccaaaacaaggacttgctgtttagccgggggtctccagctggcatgtctgttcagcccaaaaactggctacctggaccctgttaccggcagcagcgcgtttctaaaacaaaaacagacaacaacaacagcaactttacctggactggtgcttcaaaatataaccttaatgggcgtgaatctataatcaaccctggcactgctatggcctcacacaaagacgacaaagacaagttctttcccatgagcggtgtcatgatttttggaaaggagagcgccggagcttcaaacactgcattggacaatgtcatgatcacagacgaagaggaaatcaaagccactaaccccgtggccaccgaaagatttgggactgtggcagtcaatctccagagcagcagcacagaccctgcgaccggagatgtgcatgttatgggagccttacctggaatggtgtggcaagacagagacgtatacctgcagggtcccatttgggccaaaattcctcacacagatggacactttcacccgtctcctcttatgggcggctttggacttaagcacccgcctcctcagatcctcatcaaaaacacgcctgttcctgcgaatcctccggcagagttttcggctacaaagtttgcttcattcatcacccagtattctactggccaagtcagcgtggagattgaatgggagctgcagaaagaaaacagcaaacgctggaatcccgaagtgcagtatacatctaactatgcaaaatctgccaacgttgatttcactgtggacaacaatggactttatactgagcctcgtcccattggcacccgttacctcacccgtcccctgtaa

SEQ ID NO: 560 - protein, 736 aa, Artificial Sequence
  source: /note="Description of Artificial Sequence: Synthetic polypeptide"
MASDGYLPDWLEDNLSEGIREWWDLKPGAPKPKANQQKQDDGRGLVLPGYKYLGPFNGLDKGEPVNAADAAALEHDKAYDQQLRAGDNPYLRYNHADAEFQERLQEDTSFGGNLGRAVFQAKKRVLEPFGLVEEGAKTAPGKKRPVEQSPQEPDSSSGIGKTGQQPAKKRLNFGQTGDSESVPDPQPLGEPPATPAAVGPTTMASGGGAPMADNNEGADGVGNASGNWHCDSTWLGDRVITTSTRTWALPTYNNHLYKQISSASTGASNDNHYFGYSTPWGYFDFNRFHCHFSPRDWQRLINNNWGFRPKRLNFKLFNIQVKEVTTNDGVTTIANNLTSTVQVFSDSEYQLPYVLGSAHQGCLPPFPADVFMIPQYGYLTLNNGSQAVGRSSFYCLEYFPSQMLRTGNNFTFSYTFEDVPFHSSYAHSQSLDRLMNPLIDQYLYYLNRTQNQSGSAQNKDLLFSRGSPAGMSVQPKNWLPGPCYRQQRVSKTKTDNNNSNFTWTGASKYNLNGRESIINPGTAMASHKDDKDKFFPMSGVMIFGKESAGASNTALDNVMITDEEEIKATNPVATERFGTVAVNLQSSSTDPATGDVHVMGALPGMVWQDRDVYLQGPIWAKIPHTDGHFHPSPLMGGFGLKHPPPQILIKNTPVPANPPAEFSATKFASFITQYSTGQVSVEIEWELQKENSKRWNPEVQYTSNYAKSANVDFTVDNNGLYTEPRPIGTRYLTRPL

SEQ ID NO: 561 - DNA, 2211 bp, Artificial Sequence
  source: /note="Description of Artificial Sequence: Synthetic polynucleotide"
atggctgctgatggttatcttccagattggctcgaggacactctctctgaaggaataagacagtggtggaagctcaaacctggcccaccaccaccaaagcccgcagagcggcataaggacgacagcaggggtcttgtgcttcctgggtacaagtacctcggacccttcaacggactcgacaagggagagccggtcaacgaggcagacgcagcggccctcgagcacgacaaggcctacgaccagcagctcaaggccggtgacaacccctacctcaagtacaaccacgccgacgcggagttccagcagcggcttcagggcgacacatcgtttgggggcaacctcggcagagcagtcttccaggccaaaaagagggttcttgaacctcttggtctggttgagcaagcgggtgagacggctcctggaaagaagagaccgttgattgaatccccccagcagcccgactcctccacgggtatcggcaaaaaaggcaagcagccggctaaaaagagactcaattttggtcagactggcgactcagagtcagtccccgacccacaacctctcggagaacctccagcaacccccgctgctgtgggacctactacaatggcttcaggtggtggcgcaccaatggcagacaataacgaaggcgccgacggagtgggtaatgcctcaggaaattggcattgcgattccacatggctgggcgacagagtcatcaccaccagcacccgcacctgggccttgcccacctacaataaccacctctacaagcaaatctccagtgcttcaacgggggccagcaacgacaaccactacttcggctacagcaccccctgggggtattttgacttcaacagattccactgccacttttcaccacgtgactggcagcgactcatcaacaacaattggggattccggcccaagagactcaacttcaaactcttcaacatccaagtcaaggaggtcacgacgaatgatggcgtcacaaccatcgctaataaccttaccagcacggttcaagtcttctcggactcagactatcagctcccgtacgtgctcgggtcggctcacgagggctgcctcccgccgttcccagcagacgtcttcatggtgccacagtatggatacctcaccctgaacaacgggagtcaggcagtaggacgctcttcattttactgcctggagtactttccttctcagatgctgcgtaccggaaacaactttaccttcagctacacttttgaggacgttcctttccacagcagctacgctcacagccagagtctggaccgtctcatgaatcctctcatcgaccagtacctgtattacctgaacagaactcagaatcagtccggaagtgcccaaaacaaggacttgctgtttagccgggggtctccaactggcatgtctgttcagcccaaaaactggctacctggaccctgttatcggcagcagcgcgtttctaaaacaaaaacagacaacaacaacagcaactttacctggactggtgcttcaaaatataaccttaatgggcgtgaatctataatcaaccctggcactgctatggcctcacacaaagacgacaaagacaagttctttcccatgagcggtgtcatgatttttggaaaggagagcgccggagcttcaaacactgcattggacaatgtcatgatcacagacgaagaggaaatcaaagccactaaccccgtggccactgaaagatttgggactgtggcagtcaatctccagagcagcagcacagaccctgcgaccggagatgtgcatgccatgggagccttacctggaatggtgtggcaagacagagacgtatacctgcagggtcctatttgggccaaaattcctcacacggatggacactttcacccgtctcctctcatgggcggctttggactcaagaacccgcctcctcagatcctcatcaaaaacacgcctgttcctgcgaatcctccggcggagttttcagctacaaagtttgcttcattcatcacccagtattccacaggacaagtgagcgtggagattgaatgggagctgcagaaagaaaacagcaaacgctggaatcccgaagtgcagtatacatctaactatgcaaaatctgccaacgttgatttcactgtggacaacaatggactttatactgagcctcgccccattggcacccgttacctcacccgtcccctgtaa

SEQ ID NO: 562 - protein, 736 aa, Artificial Sequence
  source: /note="Description of Artificial Sequence: Synthetic polypeptide"
MAADGYLPDWLEDTLSEGIRQWWKLKPGPPPPKPAERHKDDSRGLVLPGYKYLGPFNGLDKGEPVNEADAAALEHDKAYDQQLKAGDNPYLKYNHADAEFQQRLQGDTSFGGNLGRAVFQAKKRVLEPLGLVEQAGETAPGKKRPLIESPQQPDSSTGIGKKGKQPAKKRLNFGQTGDSESVPDPQPLGEPPATPAAVGPTTMASGGGAPMADNNEGADGVGNASGNWHCDSTWLGDRVITTSTRTWALPTYNNHLYKQISSASTGASNDNHYFGYSTPWGYFDFNRFHCHFSPRDWQRLINNNWGFRPKRLNFKLFNIQVKEVTTNDGVTTIANNLTSTVQVFSDSDYQLPYVLGSAHEGCLPPFPADVFMVPQYGYLTLNNGSQAVGRSSFYCLEYFPSQMLRTGNNFTFSYTFEDVPFHSSYAHSQSLDRLMNPLIDQYLYYLNRTQNQSGSAQNKDLLFSRGSPTGMSVQPKNWLPGPCYRQQRVSKTKTDNNNSNFTWTGASKYNLNGRESIINPGTAMASHKDDKDKFFPMSGVMIFGKESAGASNTALDNVMITDEEEIKATNPVATERFGTVAVNLQSSSTDPATGDVHAMGALPGMVWQDRDVYLQGPIWAKIPHTDGHFHPSPLMGGFGLKNPPPQILIKNTPVPANPPAEFSATKFASFITQYSTGQVSVEIEWELQKENSKRWNPEVQYTSNYAKSANVDFTVDNNGLYTEPRPIGTRYLTRPL

SEQ ID NO: 563 - DNA, 2211 bp, Artificial Sequence
  source: /note="Description of Artificial Sequence: Synthetic polynucleotide"
atggctgccgatggttatcttccagattggctcgaggacaacctctctgagggcattcgcgagtggtgggcgctgaaacctggagccccgaagcccaaagccaaccagcaaaagcaggacgacggccggggtctggtgcttcctggctacaagtacctcggacccttcaacggactcgacaagggggagcccgtcaacgcggcggatgcagcggccctcgagcacgacaaggcctacgaccagcagctcaaagcgggtgacaatccgtacctgcggtataaccacgccgacgccgagtttcaggagcgtctgcaagaagatacgtcttttgggggcaacctcgggcgagcagtcttccaggccaagaagcgggttctcgaacctctcggtctggttgaggaaggcgctaagacggctcctggaaagaaacgtccggtagagcaatcgccacaagagccagactcctcctcgggcatcggcaagacaggccagcagcccgctaaaaagagactcaattttggtcagactggcgactcagagtcagtccccgacccacaacctctcggagaacctccagcaacccccgctgctgtgggacctactacaatggcttcaggcggtggcgcaccaatggcagacaataacgaaggcgccgacggagtgggtaatgcctcaggaaattggcattgcgattccacatggctgggcgacagagtcatcaccaccagcacccgaacatgggccttgcccacctataacaaccacctctacaagcaaatctccagtgcttcgacgggggccagcaacgacaaccactacttcggctacagcaccccctgggggtattttgactttaacagattccactgccacttttcaccacgtgactggcagcgactcatcaacaacaactggggattccggcccaagagactcagcttcaagctcttcaacatccaggtcaaggaggtcacgacgaatgatggcgtcacaaccatcgctaataaccttaccagcacggttcaagtcttctcggactcggagtaccagcttccgtacgtcctcggctctgcgcaccagggctgcctccctccgttcccggcggacgtgttcatgattccgcaatacggctacctgacgctcaacaatggcagccaagccgtgggacgttcatccttttactgcctggaatatttcccttctcagatgctgagaacgggcaacaactttaccttcagctacacctttgaggaagtgcctttccacagcagctacgcgcacagccagagcctggaccggctgatgaatcctctcatcgatcaatacctgtattacctgaacagaactcaaaatcagtccggaagtgcccaaaacaaggacttgctgtttagccgtgggtctccagctggcatgtctgttcagcccaaaaactggctacctggaccctgttatcggcagcagcgcgtttctaaaacaaaaacagacaacaacaacagcaattttacctggactggtgcttcaaaatataacctcaatgggcgtgaatccatcatcaaccctggcactgctatggcctcacataaagacgacgaagacaagttctttcccatgagcggtgtcatgatttttggaaaagagagcgccggagcttcaaacactgcattggacaatgtcatgattacagacgaagaggaaattaaagccactaaccctgtggccaccgaaagatttgggaccgtggcagtcaatttccagagcagcagcacagaccctgcgaccggagatgtgcatgctatgggagcattacctggcatggtgtggcaagatagagacgtgtacctgcagggtcccatttgggccaaaattcctcacacagatggacactttcacccgtctcctcttatgggcggctttggactcaagaacccgcctcctcagatcctcatcaaaaacacgcctgttcctgcgaatcctccggcggagttttcagctacaaagtttgcttcattcatcacccaatactccacaggacaagtgagcgtggagattgaatgggagctgcagaaagaaaacagcaaacgctggaatcccgaagtgcagtatacatctaactatgcaaaatctgccaacattgatttcactgtggacaacaatggactttatactgagcctcgccccattggcacccgttacctcacccgtccccagtaa

SEQ ID NO: 564 - protein, 736 aa, Artificial Sequence
  source: /note="Description of Artificial Sequence: Synthetic polypeptide"
MAADGYLPDWLEDNLSEGIREWWALKPGAPKPKANQQKQDDGRGLVLPGYKYLGPFNGLDKGEPVNAADAAALEHDKAYDQQLKAGDNPYLRYNHADAEFQERLQEDTSFGGNLGRAVFQAKKRVLEPLGLVEEGAKTAPGKKRPVEQSPQEPDSSSGIGKTGQQPAKKRLNFGQTGDSESVPDPQPLGEPPATPAAVGPTTMASGGGAPMADNNEGADGVGNASGNWHCDSTWLGDRVITTSTRTWALPTYNNHLYKQISSASTGASNDNHYFGYSTPWGYFDFNRFHCHFSPRDWQRLINNNWGFRPKRLSFKLFNIQVKEVTTNDGVTTIANNLTSTVQVFSDSEYQLPYVLGSAHQGCLPPFPADVFMIPQYGYLTLNNGSQAVGRSSFYCLEYFPSQMLRTGNNFTFSYTFEEVPFHSSYAHSQSLDRLMNPLIDQYLYYLNRTQNQSGSAQNKDLLFSRGSPAGMSVQPKNWLPGPCYRQQRVSKTKTDNNNSNFTWTGASKYNLNGRESIINPGTAMASHKDDEDKFFPMSGVMIFGKESAGASNTALDNVMITDEEEIKATNPVATERFGTVAVNFQSSSTDPATGDVHAMGALPGMVWQDRDVYLQGPIWAKIPHTDGHFHPSPLMGGFGLKNPPPQILIKNTPVPANPPAEFSATKFASFITQYSTGQVSVEIEWELQKENSKRWNPEVQYTSNYAKSANIDFTVDNNGLYTEPRPIGTRYLTRPQ

SEQ ID NO: 565 - DNA, 2211 bp, Artificial Sequence
  source: /note="Description of Artificial Sequence: Synthetic polynucleotide"
atggctgccgatggttatcttccagattggctcgaggacaacctctctgagggcattcgcgagtggtgggacttgaaacctggagccccgaaacccaaagccaaccagcaaaagcaggacgacggccggggtctggtgcttcctggctacaagtacctcggacccttcaacggactcgacaagggggagcccgtcaacgcggcggatgcagcggccctcgagcacgacaaggcctacgaccagcagctcaaagcgggtgacaatccgtaccttcggtataaccacgccgacgccgagtttcaggagcgtctgcaagaagatacgtcttttgggggcaacctcgggcgagcagtcttccaggccaaaaagagggttctcgaacctctcggtctggttgaggaagcggctaagacggctcctggaaagaaacgtccggtagagcagtcgccacaagagccagactcctcctcgggcattggcaagacaggccagcagcccgctaaaaagagactcaattttggtcagactggcgactcagagtcagtccccgacccacaacctctcggagaacctcccgcagccccctcaggtgtgggatctcttacaatggcttcaggtggtggcgcaccaatggcagacaataacgaaggcgccgacggagtgggtaatgcctcaggaaattggcattgcgattccacatggctgggcgacagagtcatcaccaccagcacccgcacctgggccttgcccacctacaataaccacctctacaagcaaatctccagtgcttcaacgggggccagcaacgacaaccactacttcggctacagcaccccctgggggtattttgacttcaacagattccactgccacttttcaccacgtgactggcaaagactcatcaacaacaattggggattccggcccaagagactcaacttcaagctcttcaacatccaagtcaaggaggtcacgacgaatgatggcgtcacgaccatcgctaataaccttaccagcacggttcaagtcttctcggactcggagtaccagttgccgtacgtcctcggctctgcgcaccagggctgcctccctccgttcccggcggacgtgttcatgattccgcagtacggctacctaacgctcaacaatggcagccaggcagtgggacggtcatccttttactgcctggaatatttcccatcgcagatgctgagaacgggcaacaactttaccttcagctacacctttgaggaagtgcctttccacagcagctacgcgcacagccagagcctggaccggctgatgaatcctctcatcgaccagtacctgtattacctgaacagaactcaaaatcagtccggaagtgcccaaaacaaggacttgctgtttagccgtgggtctccagctggcatgtctgttcagcccaaaaactggctacctggaccctgttaccggcagcagtgcgtttctaaaacaaaaacagacaacaacaacagcaactttacctggactggtgcttcaaaatataaccttaatgggcgtgaatctataatcaaccctggcactgctatggcctcacacaaagacgacaaagacaagttctttcccatgagcggtgtcatgatttttggaaaggagagcgccggagcttcaaacactgcattggacaatgtcatgatcacagacgaagaggaaatcaaagccactaaccccgtggccaccgaaagatttgggactgtggcagtcaatctccagagcagcagcacagaccctgcgaccggagatgtgcatgttatgggagccttacctggaatggtgtggcaagacagagacgtatacctgcagggtcctatttgggccaaaattcctcacacagatggacactttcacccgtctcctcttatgggcggctttggactcaagaacccgcctcctcagatcctcatcaaaaacacgcctgttcctgcgaatcctccggcggagttttcagctacaaagtttgcttcattcatcacccaatactccacaggacaagtgagcgtggagattgaatgggagctgcagaaagaaaacagcaagcgctggaatcccgaagtgcagtacacatccaattatgcaaaatctgccaacgttgatttcactgtggacaacaatggactttatactgagcctcgccccattggcacccgttacctcacccgtcccctgtaa

SEQ ID NO: 566 - protein, 736 aa, Artificial Sequence
  source: /note="Description of Artificial Sequence: Synthetic polypeptide"
MAADGYLPDWLEDNLSEGIREWWDLKPGAPKPKANQQKQDDGRGLVLPGYKYLGPFNGLDKGEPVNAADAAALEHDKAYDQQLKAGDNPYLRYNHADAEFQERLQEDTSFGGNLGRAVFQAKKRVLEPLGLVEEAAKTAPGKKRPVEQSPQEPDSSSGIGKTGQQPAKKRLNFGQTGDSESVPDPQPLGEPPAAPSGVGSLTMASGGGAPMADNNEGADGVGNASGNWHCDSTWLGDRVITTSTRTWALPTYNNHLYKQISSASTGASNDNHYFGYSTPWGYFDFNRFHCHFSPRDWQRLINNNWGFRPKRLNFKLFNIQVKEVTTNDGVTTIANNLTSTVQVFSDSEYQLPYVLGSAHQGCLPPFPADVFMIPQYGYLTLNNGSQAVGRSSFYCLEYFPSQMLRTGNNFTFSYTFEEVPFHSSYAHSQSLDRLMNPLIDQYLYYLNRTQNQSGSAQNKDLLFSRGSPAGMSVQPKNWLPGPCYRQQCVSKTKTDNNNSNFTWTGASKYNLNGRESIINPGTAMASHKDDKDKFFPMSGVMIFGKESAGASNTALDNVMITDEEEIKATNPVATERFGTVAVNLQSSSTDPATGDVHVMGALPGMVWQDRDVYLQGPIWAKIPHTDGHFHPSPLMGGFGLKNPPPQILIKNTPVPANPPAEFSATKFASFITQYSTGQVSVEIEWELQKENSKRWNPEVQYTSNYAKSANVDFTVDNNGLYTEPRPIGTRYLTRPL

SEQ ID NO: 567 - DNA, 2211 bp, Artificial Sequence
  source: /note="Description of Artificial Sequence: Synthetic polynucleotide"
atggctgccgatggttatcttccagattggctcgaggacaacctctctgagggcattcgcgaatggtgggacttgaaacctggagccccgaaacccaaagtcaaccagcaaaagcaggacaacgctcggggtcttgtgcttccgggttacaaatacctcggacccttcaacggactcgacaagggggagcccgtcaacgcggcggacgcagcggccctcgagcacgacaaggcctacgaccagcagctcaaagcgggtgacaatccgtaccttcggtataaccacgccgacgccgagtttcaggagcgtctgcaagaagatacgtcttttgggggcaaccttggacgagcagtcttccaggccaagaagagggttctcgaaccttttggtctggttgaggaaggtgctaagacggctcctggaaagaaacgtccggtagagcagtcgccacaagagccagactcctcctcgggcattggcaagacaggccagcagcccgctaaaaagagactcaattttggtcagactggcgactcagagtcagtccccgacccacaacctctcggagaacctccagcaacccccgctgctgtgggacctactacaatggcttcaggcggtggcgcaccaatggcagacaataacgaaggcgccgacggagtgggtaatgcctcaggaaattggcattgcgattccacatggctgggcgacagagtcatcaccaccagcacccgcacctgggccttgcccacctacaataaccacctctacaagcaaatctccagtgcttcaacgggggccagcaacgacaaccactacttcggctacagcaccccctgggggtattttgacttcaacagattccactgccacttttcaccacgtgactggcaaagactcatcaacaacaattggggattccggcccaagagactcaacttcaagctcttcaacatccaagtcaaggaggtcacgacgaatgatggcgtcacgaccatcgctaataaccttaccagcacggttcaagtcttctcggactcggagtaccagttgccgtacgtcctcggctctgcgcaccagggctgcctccctccgttcccggcggacgtgttcatgattccgcaatacggctacctgacgctcaacaatggcagccaggcagtgggacggtcatccttttactgcctggaatatttcccatcgcagatgctgagaacgggcaataactttaccttcagctacacttttgaggacgttcctttccacagcagctacgctcacagccagagcctggaccggctgatgaatcctctcatcgaccagtacctgtattacctgaacagaactcagaatcagtccggaagtgcccaaaacaaggacttgctgtttagccgtgggtctccaactggcatgtctgttcagcccaaaaactggctacctggaccctgttatcggcagcagcgcgtttctaaaacaaaaacagacaacaacaacagcaactttacctggactggtgcttcaaaatataaccttaatgggcgtgaatctataatcaaccctggcactgctatggcctcacacaaagacgacgaagacaagttctttcccatgagcggtgtcatgatttttggaaaggagagcgccggagcttcaaacactgcattggacaatgtcatgatcacagacgaagaggaaatcaaagccactaaccccgtggccactgaaagatttgggactgtggcagtcaatctccagagcagcagcacagaccctgcgaccggagatgtgcatgccatgggagccttacctggaatggtgtggcaagacagagacgtatacctgcagggtcctatttgggccaaaattcctcacacggatggacactttcacccgtctcctctcatgggcggctttggacttaagcacccgcctcctcagatcctcatcaaaaacacgcctgttcctgcgaatcctccggcagagttttcggctacaaagtttgcttcattcatcacccagtattccacaggacaagtgagcgtggagattgaatgggagctgcagaaagaaaacagcaaacgctggaatcccgaagtgcagtatacatctaactatgcaaaatctgccaacgttgatttcactgtggacaacaatggactttatactgagcctcgccccattggcacccgttacctcacccgtcccctgtaa

SEQ ID NO: 568 - protein, 736 aa, Artificial Sequence
  source: /note="Description of Artificial Sequence: Synthetic polypeptide"
MAADGYLPDWLEDNLSEGIREWWDLKPGAPKPKVNQQKQDNARGLVLPGYKYLGPFNGLDKGEPVNAADAAALEHDKAYDQQLKAGDNPYLRYNHADAEFQERLQEDTSFGGNLGRAVFQAKKRVLEPFGLVEEGAKTAPGKKRPVEQSPQEPDSSSGIGKTGQQPAKKRLNFGQTGDSESVPDPQPLGEPPATPAAVGPTTMASGGGAPMADNNEGADGVGNASGNWHCDSTWLGDRVITTSTRTWALPTYNNHLYKQISSASTGASNDNHYFGYSTPWGYFDFNRFHCHFSPRDWQRLINNNWGFRPKRLNFKLFNIQVKEVTTNDGVTTIANNLTSTVQVFSDSEYQLPYVLGSAHQGCLPPFPADVFMIPQYGYLTLNNGSQAVGRSSFYCLEYFPSQMLRTGNNFTFSYTFEDVPFHSSYAHSQSLDRLMNPLIDQYLYYLNRTQNQSGSAQNKDLLFSRGSPTGMSVQPKNWLPGPCYRQQRVSKTKTDNNNSNFTWTGASKYNLNGRESIINPGTAMASHKDDEDKFFPMSGVMIFGKESAGASNTALDNVMITDEEEIKATNPVATERFGTVAVNLQSSSTDPATGDVHAMGALPGMVWQDRDVYLQGPIWAKIPHTDGHFHPSPLMGGFGLKHPPPQILIKNTPVPANPPAEFSATKFASFITQYSTGQVSVEIEWELQKENSKRWNPEVQYTSNYAKSANVDFTVDNNGLYTEPRPIGTRYLTRPL

SEQ ID NO: 569 - DNA, 2208 bp, Artificial Sequence
  source: /note="Description of Artificial Sequence: Synthetic polynucleotide"
  modified_base (955)..(955): a, c, t, or g
  modified_base (971)..(972): a, c, t, or g
  modified_base (981)..(981): a, c, t, or g
  modified_base (986)..(986): a, c, t, or g
  modified_base (1235)..(1235): a, c, t, or g
  modified_base (1694)..(1696): a, c, t, or g
  modified_base (1698)..(1698): a, c, t, or g
  modified_base (1763)..(1765): a, c, t, or g
  modified_base (1778)..(1778): a, c, t, or g
  modified_base (2204)..(2204): a, c, t, or g
atggctgccgatggttatcttccagattggctcgaggacaacctctctgagggcattcgcgaatggtgggacttgaaacctggagccccgaaacccaaagtcaaccagcaaaagcaggacaacgctcggggtcttgtgcttccgggttacaaatacctcggacccttcaacggactcgacaagggggagcccgtcaacgcggcggacgcagcggccctcgagcacgacaaggcctacgaccagcagctcaaagcgggtgacaatccgtaccttcggtataaccacgccgacgccgagtttcaggagcgtctgcaagaagatacgtcttttgggggcaaccttggacgagcagtcttccaggccaagaagagggttctcgaaccttttggtctggttgaggaaggtgctaagacggctcctggaaagaaacgtccggtagagcagtcgccacaagagccagactcctcctcgggcattggcaagacaggccagcagcccgctaaaaagagactcaattttggtcagactggcgactcagagtcagtccccgacccacaacctctcggagaacctccagcaacccccgctgctgtgggacctactacaatggcttcaggcggtggcgcaccaatggcagacaataacgaaggcgccgacggagtgggtaatgcctcaggaaattggcattgcgattccacatggctgggcgacagagtcatcaccaccagcacccgaacatgggccttgcccacctataacaaccacctctacaagcaaatctccagtgcttcaacgggggccagcaacgacaaccactacttcggctacagcaccccctgggggtattttgatttcaacagattccactgccacttttcaccacgtgactggcagcgactcatcaataacaattggggattccggcccaagagactcaacttcaaactcttcaacntccaagtcaaggaggnnacgacgaangatgncgtcacaaccatcgctaataaccttaccagcacggttcaagtcttctcggactcggagtaccagcttccgtacgtcctcggctctgcgcaccagggctgcctccctccgttcccggcggacgtgttcatgattccgcaatacggctacctgacgctcaacaatggcagccaggcagtgggacggtcatccttttactgcctggaatatttcccatcgcagatgctgagaacgggcaataactttacctncagctacacttttgaggacgttcctttccacagcagctacgctcacagccagagcctggaccggctgatgaatcctctcatcgaccagtacctgtattacctgaacagaactcagaatcagtccggaagtgcccaaaacaaggacttgctgtttagccgtgggtctccaactggcatgtctgttcagcccaaaaactggctacctggaccctgttatcggcagcagcgcgtttctaaaacaaaaacagacaacaacaacagcaactttacctggactggtgcttcaaaatataaccttaatgggcgtgaatctataatcaaccctggcactgctatggcctcacacaaagacgacgaagacaagttctttcccatgagcggtgtcatgatttttggaaaggagagcgccggagcttcaaacactgcattggacaatgtcatgatcacagacgaagagannncnaagccactaaccccgtggccactgaaagatttgggactgtggcagtcaatctccaagcagcacannnaccctgcgaccgnagatgtgcatgccatgggagccttacctggaatggtgtggcaagacagagacgtatacctgcagggtcctatttgggccaaaattcctcacacggatggacactttcacccgtctcctctcatgggcggctttggacttaagcacccgcctcctcagatcctcatcaaaaacacgcctgttcctgcgaatcctccggcagagttttcggctacaaagtttgcttcattcatcacccagtattccacaggacaagtgagcgtggagattgaatgggagctgcagaaagaaaacagcaaacgctggaatcccgaagtgcagtatacatctaactatgcaaaatctgccaacgttgatttcactgtggacaacaatggactttatactgagcctcgccccattggcacccgttacctcacccgtccccngtaa

SEQ ID NO: 570 - protein, 723 aa, Artificial Sequence
  source: /note="Description of Artificial Sequence: Synthetic polypeptide"
MAADGYLPDWLEDNLSEGIREWWDLKPGAPKPKVNQQKQDNARGLVLPGYKYLGPFNGLDKGEPVNAADAAALEHDKAYDQQLKAGDNPYLRYNHADAEFQERLQEDTSFGGNLGRAVFQAKKRVLEPFGLVEEGAKTAPGKKRPVEQSPQEPDSSSGIGKTGQQPAKKRLNFGQTGDSESVPDPQPLGEPPATPAAVGPTTMASGGGAPMADNNEGADGVGNASGNWHCDSTWLGDRVITTSTRTWALPTYNNHLYKQISSASTGASNDNHYFGYSTPWGYFDFNRFHCHFSPRDWQRLINNNWGFRPKRLNFKLFNQVKETTDVTTIANNLTSTVQVFSDSEYQLPYVLGSAHQGCLPPFPADVFMIPQYGYLTLNNGSQAVGRSSFYCLEYFPSQMLRTGNNFTSYTFEDVPFHSSYAHSQSLDRLMNPLIDQYLYYLNRTQNQSGSAQNKDLLFSRGSPTGMSVQPKNWLPGPCYRQQRVSKTKTDNNNSNFTWTGASKYNLNGRESIINPGTAMASHKDDEDKFFPMSGVMIFGKESAGASNTALDNVMITDEEATNPVATERFGTVAVNLQSSPATDVHAMGALPGMVWQDRDVYLQGPIWAKIPHTDGHFHPSPLMGGFGLKHPPPQILIKNTPVPANPPAEFSATKFASFITQYSTGQVSVEIEWELQKENSKRWNPEVQYTSNYAKSANVDFTVDNNGLYTEPRPIGTRYLTRP

SEQ ID NO: 571 - DNA, 2208 bp, Artificial Sequence
  source: /note="Description of Artificial Sequence: Synthetic polynucleotide"
atggctgccgatggttatcttccagattggctcgaggacactctctctgaaggaataagacagtggtggaagctcaaacctggcccaccaccaccaaagcccgcagagcggcataaggacgacagcaggggtcttgtgcttcctgggtacaagtacctcggacccttcaacggactcgacaagggagagccggtcaacgaggcagacgccgcggccctcgagcacgacaaagcctatgaccggcagctcgacagcggagacaacccgtacctcaagtacaaccacgccgacgcggagtttcaggagcgccttaaagaagatacgtcttttgggggcaacctcggacgagcagtcttccaggcgaaaaagagggttcttgaacctctgggcctggttgaggaacctgttaagacggctccgggaaaaaagaggccggtagagcactctcctgtggagccagactcctcctcgggaaccggaaaggcgggtcagcagcctgcaagaaaaagattgaattttggtcagactggagacgcagactcagtacctgacccccagcctctcggacagccaccagcagccccctctggtctgggaactaatacgatggctacaggcagtggcgcaccaatggcagacaataacgagggcgccgacggagtgggtaattcctcgggaaattggcattgcgattccacatggatgggcgacagagtcatcaccaccagcacccgaacctgggccctgcccacctacaacaaccacctctacaaacaaatttccagccaatcaggagcctcgaacgacaatcactactttggctacagcaccccttgggggtattttgacttcaacagattccactgccacttttcaccacgtgactggcaaagactcatcaacaacaactggggattccgacccaagagactcaagttcaagctctttaacattcaagtcaaagaggtcacgcagaatgacggtacgacgacgattgccaataaccttaccagcacggttcaggtgtttactgactcggagtaccagctcccgtacgtcctcggctcggcgcatcaaggatgcctcccgccgttcccagcagacgtcttcatggtgccacagtatggatacctcaccctgaacaacgggagtcaggcagtaggacgctcttcattttactgcctggagtactttccttctcagatgctgcgtaccggtaacaactttaccttcagctacacttttgaggacgttcctttccacagcagctacgctcacagccagagtctggaccgtctcatgaatcctctcatcgaccagtacctgtattacttgagcagaacagacgctccaagtggaaccaccacgcagtcaaggcttcagttttctcaggccggagcgagtgacattcgggaccagtctaggaactggcttcctggaccctgttaccgccagcagcgagtatcaaagacatctgcggataacaacaacagtgaatactcgtggactggagctaccaagtaccacctcaatggcagagactctctggtgaatccgggcccggccatggcaagccacaaggacgatgaagaaaagttttttcctcagagcggggttctcatctttgggaagcaaggctcagagaaaacaagtgtggacattgaaaaggtcatgattacagacgaagaggaaatcaggacaaccaatcccgtggctacggagcagtatggttctgtatctaccaacctccagagaggcaacagacaagcagctaccgcagatgtcaacacacaaggcgttcttccaggcatggtctggcaggacagagatgtgtaccttcaggggcccatctgggcaaagattccacacacggacggacattttcacccctctcccctcatgggtggattcggacttaaacaccctcctccacagattctcatcaagaacaccccggtacctgcgaatccttcgaccaccttcagtgcggcaaagtttgcttccttcatcacacagtactccacgggacaggtcagcgtggagatcgagtgggagctgcagaaggaaaacagcaaacgctggaatcccgaagttcagtacacttccaactacaacaagtctgttaatgtggactttactgtggacactaatggcgtgtattcagagcctcgccccattggcaccagatacctgactcgtaatctgtaa

SEQ ID NO: 572 - protein, 735 aa, Artificial Sequence
  source: /note="Description of Artificial Sequence: Synthetic polypeptide"
MAADGYLPDWLEDTLSEGIRQWWKLKPGPPPPKPAERHKDDSRGLVLPGYKYLGPFNGLDKGEPVNEADAAALEHDKAYDRQLDSGDNPYLKYNHADAEFQERLKEDTSFGGNLGRAVFQAKKRVLEPLGLVEEPVKTAPGKKRPVEHSPVEPDSSSGTGKAGQQPARKRLNFGQTGDADSVPDPQPLGQPPAAPSGLGTNTMATGSGAPMADNNEGADGVGNSSGNWHCDSTWMGDRVITTSTRTWALPTYNNHLYKQISSQSGASNDNHYFGYSTPWGYFDFNRFHCHFSPRDWQRLINNNWGFRPKRLKFKLFNIQVKEVTQNDGTTTIANNLTSTVQVFTDSEYQLPYVLGSAHQGCLPPFPADVFMVPQYGYLTLNNGSQAVGRSSFYCLEYFPSQMLRTGNNFTFSYTFEDVPFHSSYAHSQSLDRLMNPLIDQYLYYLSRTDAPSGTTTQSRLQFSQAGASDIRDQSRNWLPGPCYRQQRVSKTSADNNNSEYSWTGATKYHLNGRDSLVNPGPAMASHKDDEEKFFPQSGVLIFGKQGSEKTSVDIEKVMITDEEEIRTTNPVATEQYGSVSTNLQRGNRQAATADVNTQGVLPGMVWQDRDVYLQGPIWAKIPHTDGHFHPSPLMGGFGLKHPPPQILIKNTPVPANPSTTFSAAKFASFITQYSTGQVSVEIEWELQKENSKRWNPEVQYTSNYNKSVNVDFTVDTNGVYSEPRPIGTRYLTRNL

SEQ ID NO: 573 - DNA, 2208 bp, Artificial Sequence
  source: /note="Description of Artificial Sequence: Synthetic polynucleotide"
atggctgccgatggttatcttccagattggctcgaggacactctctctgaaggaataagacagtggtggaagctcaaacctggcccaccaccaccaaagcccgcagagcggcataaggacgacagcaggggtcttgtgcttcctgggtacaagtacctcggacccttcaacggactcgacaagggagagccggtcaacgaggcagacgccgcggccctcgagcacgacaaagcctatgaccggcagctcgacagcggagacaacccgtacctcaagtacaaccacgccgacgcggagtttcaggagcgccttaaagaagatacgtcttttgggggcaacctcggacgagcagtcttccaggcgaaaaagagggttcttgaacctctgggcctggttgaggaacctgttaagacggctccgggaaaaaagaggccggtagagcactctcctgtggagccagactcctcctcgggaaccggaaaggcgggccagcagcctgcaagaaaaagattgaattttggtcagactggagacgcaaactcagtacctgacccccagcctctcggacagccaccagcagccccctctggtctgggaactaatacgatggctacaggcagtggcgcaccaatggcagacaataacgagggcgccgacggagtgggtaattcctcgggaaattggcattgcgattccacatggatgggcgacagagtcatcaccaccagcacccgaacctgggccctgcccacctacaacaaccacctctacaaacaaatttccagccaatcaggagcctcgaacgacaatcactactttggctacagcaccccttgggggtattttgacttcaacagattccactgccacttttcaccacgtgactggcaaagactcatcaacaacaactggggattccgacccaagagactcaagttcaagctctttaacattcaagtcaaagaggtcacgcagaatgacggtacgacgacgattgccaataaccttaccagcacggttcaggtgtttactgactcggagtaccagctcccgtacgtcctcggctcggcgcatcaaggatgcctcccgccgttcccagcagacgtcttcatggtgccacagtatggatacctcaccctgaacaacgggagtcgggcagtaggacgctcttcattttactgcctggagtactttccttctcagatgctgcgtaccggtaacaactttaccttcagctacacttttgaggacgttcctttccacagcagctacgctcacagccagagtctggaccgtctcatgaatcctctcatcgaccagtacctgtattacttgagcagaacagacactccaagtggaaccaccacgcagtcaaggcttcagttttctcaggccggagcgagtgacattcgggaccagtctaggaactggcttcctggaccctgttaccgccagcagcgagtatcaaagacatctgcggataacaacaacagtgaatactcgtggactggagctaccaagtaccacctcaatggcagagactctctggtgaatccgggcccggccatggcaagccacaaggacgatgaagaaaagttttttcctcagagcggggttctcatctttgggaagcaaggctcagagaaaacaagtgtggacattgaaaaggtcatgattacagacgaagaggaaatcaggacgaccaatcccgtggctacggagcagtatggttctgtatctaccaacctccagagaggcaacagacaagcagctaccgcagatgtcaacacacaaggcgttcttccaggcatggtctggcaggacagagatgtgtaccttcaggggcccatctgggcaaagattccacacacggacggacattttcacccctctcccctcatgggtggattcggacttaaacaccctcctccacagattctcatcaagaacaccccggtacctgcgaatccttcgaccaccttcagtgcggcaaagtttgcttccttcatcacacagtactccacgggacaggtcagcgtggagatcgagtgggagctgcagaaggaaaacagcaaacgctggaatcccgaagttcagtacacttccaactacaacaagtctgttaatgtggactttactgtggacactaatggcgtgtatacagagcctcgccccattggcaccagatacctgactcgtaatctgtaa

SEQ ID NO: 574 - protein, 735 aa, Artificial Sequence
  source: /note="Description of Artificial Sequence: Synthetic polypeptide"
MAADGYLPDWLEDTLSEGIRQWWKLKPGPPPPKPAERHKDDSRGLVLPGYKYLGPFNGLDKGEPVNEADAAALEHDKAYDRQLDSGDNPYLKYNHADAEFQERLKEDTSFGGNLGRAVFQAKKRVLEPLGLVEEPVKTAPGKKRPVEHSPVEPDSSSGTGKAGQQPARKRLNFGQTGDANSVPDPQPLGQPPAAPSGLGTNTMATGSGAPMADNNEGADGVGNSSGNWHCDSTWMGDRVITTSTRTWALPTYNNHLYKQISSQSGASNDNHYFGYSTPWGYFDFNRFHCHFSPRDWQRLINNNWGFRPKRLKFKLFNIQVKEVTQNDGTTTIANNLTSTVQVFTDSEYQLPYVLGSAHQGCLPPFPADVFMVPQYGYLTLNNGSRAVGRSSFYCLEYFPSQMLRTGNNFTFSYTFEDVPFHSSYAHSQSLDRLMNPLIDQYLYYLSRTDTPSGTTTQSRLQFSQAGASDIRDQSRNWLPGPCYRQQRVSKTSADNNNSEYSWTGATKYHLNGRDSLVNPGPAMASHKDDEEKFFPQSGVLIFGKQGSEKTSVDIEKVMITDEEEIRTTNPVATEQYGSVSTNLQRGNRQAATADVNTQGVLPGMVWQDRDVYLQGPIWAKIPHTDGHFHPSPLMGGFGLKHPPPQILIKNTPVPANPSTTFSAAKFASFITQYSTGQVSVEIEWELQKENSKRWNPEVQYTSNYNKSVNVDFTVDTNGVYTEPRPIGTRYLTRNL

SEQ ID NO: 575 - DNA, 2211 bp, Artificial Sequence
  source: /note="Description of Artificial Sequence: Synthetic polynucleotide"
atggctgccgatggttatcttccagattggctcgaggacactctctctgaaggaataagacagtggtggaagctcaaacctggcccaccaccaccaaagcccgcagagcggcataaggacgacagcaggggtcttgtgcttcctgggtacaagtacctcggacccttcaacggactcgacaagggagagccggtcaacgaggcagacgccgcggccctcgagcacgacaaggcctacgaccagcagctcaaagcgggtgacaatccgtacctgcggtataaccacgccgacgccgagtttcaggagcgtctgcaagaagatacgtcttttgggggcaacctcgggcgagcagtcttccaggccaagaagcgggttctcgaacctctcggtctggttgaggaaggcgctaagacggctcctggaaagaaacgtccggtagagcagtcgccacaagagccagactcctcctcgggcatcggcaagacaggccagcagcccgctaaaaagagactcaattttggtcagactggcgactcagagtcagtccccgacccacaacctctcggagaacctccagcaacccccgctgctgtgggacctactacaatggcttcaggcggtggcgcaccaatggcagacaataacgaaggcgccgacggagtgggtaatgcctcaggaaattggcattgcgattccacatggctgggcgacagagtcatcaccaccagcacccgaacatgggccttgcccacctataacaaccacctctacaagcaaatctccagtgcttcgacgggggccagcaacgacaaccactacttcggctacagcaccccctgggggtattttgactttaacagattccactgccacttttcaccacgtgactggcagcgactcatcaacaataactggggattccggcccaagagactcagcttcaagctcttcaacatccaggtcaaggaggtcacgacgaatgatggcgtcacaaccatcgctaataaccttaccagcacggttcaagtcttctcggactcggagtaccagcttccgtacgtcctcggctctgcgcaccagggctgcctccctccgttcccggcggacgtgttcatgattccgcaatacggctacctgacgctcaacaatggcagccaagccgtgggacgttcatccttttactgcctggaatatttcccttctcagatgctgagaacgggcaacaactttaccttcagctacacctttgaggaagtgcctttccacagcagctacgcgcacagccagagcctggaccggctgatgaatcctctcatcgatcaatacctgtattacctgaacagaactcaaaatcagtccggaagtgcccaaaacaaggacttgctgtttagccgtgggtctccagctggcatgtctgttcagcccaaaaactggctacctggaccctgttatcggcagcagcgcgtttctaaaacaaaaacagacaacaacaacagcaattttacctggactggtgcttcaaaatataacctcaatgggcgtgaatccatcatcaaccctggcactgctatggcctcacacaaagacgacgaagacaagttctttcccatgagcggtgtcatgatttttggaaaagagagcgccggagcttcaaacactgcattggacaatgtcatgattacggacgaagaggaaattaaagccactaaccctgtggccaccgaaagatttgggaccgtggcagtcaatttccagagcagcagcacagaccctgcgaccggagatgtgcatgctatgggagcattacctggcatggtgtggcaagatagagacgtgtacctgcagggtcccatttgggccaaaattcctcacacagatggacactttcacccgtctcctcttatgggcggctttggactcaagaacccgcctcctcagatcctcatcaaaaacacgcctgttcctgcgaatcctccggcggagttttcagctacaaagtttgcttcattcatcactcaatactccacaggacaagtgagcgtggaaattgaatgggagctgcagaaagaaaacagcaaacgctggaatcccgaagtgcagtatacatctaactatgcaaaatctgccaacgttgatttcactgtggacaacaatggactttatactgagcctcgccccattggcacccgttacctcacccgtcccctgtaa

SEQ ID NO: 576 - protein, 736 aa, Artificial Sequence
  source: /note="Description of Artificial Sequence: Synthetic polypeptide"
MAADGYLPDWLEDTLSEGIRQWWKLKPGPPPPKPAERHKDDSRGLVLPGYKYLGPFNGLDKGEPVNEADAAALEHDKAYDQQLKAGDNPYLRYNHADAEFQERLQEDTSFGGNLGRAVFQAKKRVLEPLGLVEEGAKTAPGKKRPVEQSPQEPDSSSGIGKTGQQPAKKRLNFGQTGDSESVPDPQPLGEPPATPAAVGPTTMASGGGAPMADNNEGADGVGNASGNWHCDSTWLGDRVITTSTRTWALPTYNNHLYKQISSASTGASNDNHYFGYSTPWGYFDFNRFHCHFSPRDWQRLINNNWGFRPKRLSFKLFNIQVKEVTTNDGVTTIANNLTSTVQVFSDSEYQLPYVLGSAHQGCLPPFPADVFMIPQYGYLTLNNGSQAVGRSSFYCLEYFPSQMLRTGNNFTFSYTFEEVPFHSSYAHSQSLDRLMNPLIDQYLYYLNRTQNQSGSAQNKDLLFSRGSPAGMSVQPKNWLPGPCYRQQRVSKTKTDNNNSNFTWTGASKYNLNGRESIINPGTAMASHKDDEDKFFPMSGVMIFGKESAGASNTALDNVMITDEEEIKATNPVATERFGTVAVNFQSSSTDPATGDVHAMGALPGMVWQDRDVYLQGPIWAKIPHTDGHFHPSPLMGGFGLKNPPPQILIKNTPVPANPPAEFSATKFASFITQYSTGQVSVEIEWELQKENSKRWNPEVQYTSNYAKSANVDFTVDNNGLYTEPRPIGTRYLTRPL

SEQ ID NO: 577 - protein, 735 aa, Artificial Sequence
  source: /note="Description of Artificial Sequence: Synthetic polypeptide"
MAADGYLPDWLEDTLSEGIRQWWKLKPGPPPPKPAERHKDDSRGLVLPGYKYLGPFNGLDKGEPVNEADAAALEHDKAYDRQLDSGDNPYLKYNHADAEFQERLKEDTSFGGNLGRAVFQAKKRVLEPLGLVEEPVKTAPGKKRPVEHSPVEPDSSSGTGKAGQQPARKRLNFGQTGDADSVPDPQPLGQPPAAPSGLGTNTMATGSGAPMADNNEGADGVGNSSGNWHCDSTWMGDRVITTSTRTWALPTYNNHLYKQISSQSGASNDNHYFGYSTPWGYFDFNRFHCHFSPRDWQRLINNNWGFRPKRLKFKLFNIQVKEVTQNDGTTTIANNLTSTVQVFTDSEYQLPYVLGSAHQGCLPPFPADVFMVPQYGYLTLNNGSQAVGRSSFYCLEYFPSQMLRTGNNFTFSYTFEDVPFHSSYAHSQSLDRLMNPLIDQYLYYLSRTDTPSGTTTQSRLQFSQAGASDIRNQSRNWLPGPCYRQQRVSKTSADNNNSEYSWTGATKYHLNGRDSLVNPGPAMASHKDDEEKFFPQSGVLIFGKQGSEKTSVDIEKVMITDEEEIRTTNPVATEQYGSVSTNLQRGNRQAATADVNTQGVLPGMVWQDRDVYLQGPIWAKIPHTDGHFHPSPLMGGFGLKHPPPQILIKNTPVPANPSTTFSAAKFASFITQYSTGQVSVEIEWELQKENSKRWNPEVQYTSNYNKSVNVDFTVDTNGVYSEPRPIGTRYLTRNQ

SEQ ID NO: 578 - DNA, 2208 bp, Artificial Sequence
  source: /note="Description of Artificial Sequence: Synthetic polynucleotide"
atggctgccgatggttatcttccagattggctcgaggacactctctctgaaggaataagacagtggtggaagctcaaacctggcccaccaccaccaaagcccgcagagcggcataaggacgacagcaggggtcttgtgcttcctgggtacaagtacctcggacccttcaacggactcgacaagggagagccggtcaacgaggcagacgccgcggccctcgagcacgacaaagcctatgaccggcagctcgacagcggagacaacccgtacctcaagtacaaccacgccgacgcggagtttcaggaacgccttaaagaagatacgtcttttgggggcaacctcggacgagcagtcttccaggcgaaaaagagggttcttgaacctctgggcctggttgaggaacctgttaagacggctccgggaaaaaagaggccggtagagcactctcctgtggagccagactcctcctcgggaaccggaaaggcgggccagcagcctgcaagaaaaagattgaattttggtcagactggagacgcagactcagtacctgacccccagcctctcggacagccaccagcagccccctctggtctgggaactaatacgatggctacaggcagtggcgcaccaatggcagacaataacgagggcgccgacggagtgggtaattcctcgggaaattggcattgcgattccacatggatgggcgacagagtcatcaccaccagcacccgaacctgggccctgcccacctacaacaaccacctctacaaacaaatttccagccaatcaggagcctcgaacgacaatcactactttggctacagcaccccttgggggtattttgacttcaacagattccactgccacttttcaccacgtgactggcaaagactcatcaacaacaactggggattccgacccaagagactcaagttcaagctctttaacattcaagtcaaagaggtcacgcagaatgacggtacgacgacgattgccaataaccttaccagcacggttcaggtgtttactgactcggagtaccagctcccgtacgtcctcggctcggcgcatcaaggatgcctcccgccgttcccagcagacgtcttcatggtgccacagtatggatacctcaccctgaacaacgggagtcaggcagtaggacgctcttcattttactgcctggagtactttccttctcagatgctgcgtaccggtaacaactttaccttcagctacacttttgaggacgttcctttccacagcagctacgctcacagccagagtctggaccgtctcatgaatcctctcatcgaccagtacctgtattacttgagcagaacagacactccaagtggaaccaccacgcagtcaaggcttcagttttctcaggccggagcgagtgacattcggaaccagtctaggaactggcttcctggaccctgttaccgccagcagcgagtatcaaagacatctgcggataacaacaacagtgaatactcgtggactggagctaccaagtaccacctcaatggcagagactctctggtgaatccgggcccggccatggcaagccacaaggacgatgaagaaaagttttttcctcagagcggggttctcatctttgggaagcaaggctcagagaaaacaagtgtggacattgaaaaggtcatgattacagacgaagaggaaatcaggacaaccaatcccgtggctacggagcagtatggttctgtatctaccaacctccagagaggcaacagacaagcagctaccgcagatgtcaacacacaaggcgttcttccaggcatggtctggcaggacagagatgtgtaccttcaggggcccatctgggcaaagattccacacacggacggacattttcacccctctcccctcatgggtggattcggacttaaacaccctcctccacagattctcatcaagaacaccccggtacctgcgaatccttcgaccaccttcagtgcggcaaagtttgcttccttcatcacacagtactccacgggacaggtcagcgtggagatcgagtgggagctgcagaaggaaaacagcaaacgctggaatcccgaagttcagtacacttccaactacaacaagtctgttaatgtggactttactgtggacactaatggcgtgtattcagagcctcgccccattggcaccagatacctgactcgtaatcagtaa

SEQ ID NO: 579 - DNA, 2208 bp, Artificial Sequence
  source: /note="Description of Artificial Sequence: Synthetic polynucleotide"
atggctgccgatggttatcttccagattggctcgaggacactctctctgaaggaataagacagtggtggaagctcaaacctggcccaccaccaccaaagcccgcagagcggcataaggacgacagcaggggtcttgtgcttcctgggtacaagtacctcggacccttcaacggactcgacaagggagagccggtcaacgaggcagacgccgcggccctcgagcacgacaaagcctatgaccggcagctcgacagcggagacaacccgtacctcaagtacaaccacgccgacgcggagtttcaggagcgccttaaagaagatacgtcttttgggggcaacctcggacgagcagtcttccaggcgaaaaagagggttcttgaacctctgggcctggttgaggaacctgttaagacggctccgggaaaaaagaggccggtagagcactctcctgtggagccagactcctcctcgggaaccggaaaggcgggccagcagcctgcaagaaaaagattgaattttggtcagactggagacgcagactcagtacctgatccccagcctctcggacagccaccagcagccccctctggtctgggaactaatacgatggctacaggcagtggcgcaccaatggcagacaataacgagggcgccgacggagtgggtaattcctcgggaaattggcattgcgattccacatggatgggcgacagagtcatcaccaccagcacccgaacctgggccctgcccacctacaacaaccacctctacaaacaaatttccagccaatcaggagcctcgaacgacaatcactactttggctacagcaccccttgggggtattttgacttcaacagattccactgccacttttcaccacgtgactggcaaagactcatcaacaacaactggggattccgacccaagagactcaagttcaagctctttaacattcaagtcaaagaggtcacgcagaatgacggtacgacgacgattgccaataaccttaccagcacggttcaggtgtttactgactcggagtaccagctcccgtatgtcctcggctcggcgcatcaaggatgcctcccgccgttcccagcagacgtcttcatggtgccacagtatggatacctcaccctgaacaacgggagtcaggcagtaggacgctcttcattttactgcctggagtactttccttctcagatgctgcgtaccggtaacaactttaccttcagctacacttttgaggacgttcctttccacagcagctacgctcacagccagagtctggaccgtctcatgaatcctctcatcgaccagtacctgtattacttgagcagaacagacactccaagtggaaccaccacgcagtcaaggcttcagttttctcaggccggagcgagtgacattcgggaccagtctaggaactggcttcctggaccctgttaccgccagcagcgagtatcaaagacatctgcggataacaacaacagtgaatactcgtggactggagctaccaagtaccacctcaatggcagagactctctggtgaatccgggcccggccatggcaagccacaaggacgatgaagaaaagttttttcctcagagcggggttctcatctttgggaagcaaggctcagagaaaacaagtgtggacattgaaaaggtcatgattacagacgaagaggaaatcaggacaaccaatcccgtggctacggagcagtatggttctgtatctaccaacctccagagaggcaacagacaagcagctaccgcagatgtcaacacacaaggcgttcttccaggcatggtctggcaggacagagatgtgtaccttcaggggcccatctgggcaaagattccacacacggacggacattttcacccctctcccctcatgggtggattcggacttaaacaccctcctccacagattctcatcaagaacaccccggtacctgcgaatccttcgaccaccttcagtgcggcaaagtttgcttccttcatcacacagtactccacgggacaggtcagcgtggagatcgagtgggagctgcagaaggaaaacagcaaacgctggaatcccgaagttcagtacacttccaactacaacaagtctgttaatgtggactttactgtggacactaatggcgtgtattcagagcctcgccccattggcaccagatacctgactcgtaatctgtaa

SEQ ID NO: 580 - protein, 735 aa, Artificial Sequence
  source: /note="Description of Artificial Sequence: Synthetic polypeptide"
MAADGYLPDWLEDTLSEGIRQWWKLKPGPPPPKPAERHKDDSRGLVLPGYKYLGPFNGLDKGEPVNEADAAALEHDKAYDRQLDSGDNPYLKYNHADAEFQERLKEDTSFGGNLGRAVFQAKKRVLEPLGLVEEPVKTAPGKKRPVEHSPVEPDSSSGTGKAGQQPARKRLNFGQTGDADSVPDPQPLGQPPAAPSGLGTNTMATGSGAPMADNNEGADGVGNSSGNWHCDSTWMGDRVITTSTRTWALPTYNNHLYKQISSQSGASNDNHYFGYSTPWGYFDFNRFHCHFSPRDWQRLINNNWGFRPKRLKFKLFNIQVKEVTQNDGTTTIANNLTSTVQVFTDSEYQLPYVLGSAHQGCLPPFPADVFMVPQYGYLTLNNGSQAVGRSSFYCLEYFPSQMLRTGNNFTFSYTFEDVPFHSSYAHSQSLDRLMNPLIDQYLYYLSRTDTPSGTTTQSRLQFSQAGASDIRDQSRNWLPGPCYRQQRVSKTSADNNNSEYSWTGATKYHLNGRDSLVNPGPAMASHKDDEEKFFPQSGVLIFGKQGSEKTSVDIEKVMITDEEEIRTTNPVATEQYGSVSTNLQRGNRQAATADVNTQGVLPGMVWQDRDVYLQGPIWAKIPHTDGHFHPSPLMGGFGLKHPPPQILIKNTPVPANPSTTFSAAKFASFITQYSTGQVSVEIEWELQKENSKRWNPEVQYTSNYNKSVNVDFTVDTNGVYSEPRPIGTRYLTRNL

SEQ ID NO: 581 - DNA, 2601 bp, Artificial Sequence
  source: /note="Description of Artificial Sequence: Synthetic polynucleotide"
ccatcgacgtcagacgcggaagcttcgatcaactacgcggacaggtaccaaaacaaatgttctcgtcacgtgggcatgaatctgatgctgtttccctgcagacaatgcgagagactgaatcagaattcaaatatctgcttcactcacggtgtcaaagactgtttagagtgctttcccgtgtcagaatctcaacccgtttctgtcgtcaaaaaggcgtatcagaaactgtgctacattcatcacatcatgggaaaggtgccagacgcttgcactgcttgcgacctggtcaatgtggacttggatgactgtgtttctgaacaataaatgacttaaaccaggtatgactgccgatggttatcttccagattggctcgaggacaaccttagtgaaggaattcgcgagtggtgggctttgaaacctggagcccctcaacccaaggcaaatcaacaacatcaagacaacgctcgaggtcttgtgcttccgggttacaaataccttggacccggcaacggactcgacaagggggagccggtcaacgcagcagacgcggcggccctcgagcacgacaaggcctacgaccagcagctcaaggccggagacaacccgtacctcaagtacaaccacgccgacgccgagttccaggagcggctcaaagaagatacgtcttttgggggcaacctcgggcgagcagtcttccaggccaaaaagaggcttcttgaacctcttggtctggttgaggaagcggctaagacggctcctggaaagaagaggcctgtagagcagtctcctcaggaaccggactcctccgcgggtattggcaaatcgggtgcacagcccgctaaaaagagactcaatttcggtcagactggcgacacagagtcagtcccagaccctcaaccaatcggagaacctcccgcagccccctcaggtgtgggatctcttacaatggcttcaggtggtggcgcaccagtggcagacaataacgaaggtgccgatggagtgggtagttcctcgggaaattggcattgcgattcccaatggctgggggacagagtcatcaccaccagcacccgaacctgggccctgcccacctacaacaatcacctctacaagcaaatctccaacagcacatctggaggatcttcaaatgacaacgcctacttcggctacagcaccccctgggggtattttgacttcaacagattccactgccacttctcaccacgtgactggcagcgactcatcaacaacaactggggattccggcctaagcaactcaacttcaagctcttcaacattcaggtcaaagaggttacggacaacaatggagtcaagaccatcgccaataaccttaccagcacggtccaggtcttcacggactcagactatcagctcccgtacgtgctcgggtcggctcacgagggctgcctcccgccgttcccagcggacgttttcatgattcctcagtacgggtatctgacgcttaatgatggaagccaggccgtgggtcgttcgtccttttactgcctggaatatttcccgtcgcaaatgctaagaacgggtaacaacttccagttcagctacgagtttgagaacgtacctttccatagcagctacgctcacagccaaagcctggaccgactaatgaatccactcatcgaccaatacttgtactatctctcaaagactattaacggttctggacagaatcaacaaacgctaaaattcagtgtggccggacccagcaacatggctgtccagggaagaaactacatacctggacccagctaccgacaacaacgtgtctcaaccactgtgactcaaaacaacaacagcgaatttgcttggcctggagcttcttcttgggctctcaatggacgtaatagcttgatgaatcctggacctgctatggccagccacaaagaaggagaggaccgtttctttcctttgtctggatctttaatttttggcaaacaaggaactggaagagacaacgtggatgcggacaaagtcatgataaccaacgaagaagaaattaaaactactaacccggtagcaacggagtcctatggacaagtggccacaaaccaccagagtgcccaagcacaggcgcagaccggctgggttcaaaaccaaggaatacttccgggtatggtttggcaggacagagatgtgtacctgcaaggacccatttgggccaaaattcctcacacggacggcaactttcacccttctccgctgatgggagggtttggaatgaagcacccgcctcctcagatcctcatcaaaaacacacctgtacctgcggatcctccaacggccttcaacaaggacaagctgaactctttcatcacccagtattctactggccaagtcagcgtggagatcgagtgggagctgcagaaggaaaacagcaagcgctggaacccggagatccagtacacttccaactattacaagtctaataatgttgaatttgctgttaatactgaaggtgtatatagtgaaccccgccccattggcaccagatacctgactcgtaatctgtaattgcttgttaatcaataaaccgtttaattcgtttcagttgaactgcggcc

SEQ ID NO: 582 - DNA, 2601 bp, Artificial Sequence
  source: /note="Description of Artificial Sequence: Synthetic polynucleotide"
ccatcgacgtcagacgcggaagcttcgatcaactacgcggacaggtaccaaaacaaatgttctcgtcacgtgggcatgaatctgatgctgtttccctgcagacaatgcgagagactgaatcagaattcaaatatctgcttcactcacggtgtcaaagactgtttagagtgctttcccgtgtcagaatctcaacccgtttctgtcgtcaaaaaggcgtatcagaaactgtgctacattcatcacatcatgggaaaggtgccagacgcttgcactgcttgcgacctggtcaatgtggacttggatgactgtgtttctgaacaataaatgacttaaaccaggtatggctgccgatggttatcttccagattggctcgaggacaaccttagtgaaggaattcgcgagtggtgggctttgaaacctggagcccctcaacccaaggcaaatcaacaacatcaagacaacgctcgaggtcttgtgcttccgggttacaaataccttggacccggcaacggactcgacaagggggagccggtcaacgcagcagacgcggcggccctcgagcacgacaaggcctacgaccagcagctcaaggccggagacaacccgtacctcaagtacaaccacgccgacgccgagttccaggagcggctcaaagaagatacgtcttttgggggcaacctcgggcgagcagtcttccaggccaaaaagaggcttcttgaacctcttggtctggttgaggaagcggctaagacggctcctggaaagaagaggcctgtagagcagtctcctcaggaaccggactcctccgcgggtattggcaaatcgggtgcacagcccgctaaaaagagactcaatttcggtcagactggcgacacagagtcagtcccagaccctcaaccaatcggagaacctcccgcagccccctcaggtgtgggatctcttacaatggcttcaggtggtggcgcaccagtggcagacaataacgaaggtgccgatggagtgggtagttcctcgggaaattggcattgcgattcccaatggctgggggacagagtcatcaccaccagcacccgaacctgggccctgcccacctacaacaatcacctctacaagcaaatctccaacagcacatctggaggatcttcaaatgacaacgcctacttcggctacagcaccccctgggggtattttgacttcaacagattccactgccacttctcaccacgtgactggcagcgactcatcaacaacaactggggattccggcctaagcgactcaacttcaagctcttcaacattcaggtcaaagaggttacggacaacaatggagtcaagaccatcgccaataaccttaccagcacggtccaggtcttcacggactcagactatcagctcccgtacgtgctcgggtcggctcacgagggctgcctcccgccgttcccagcggacgttttcatgattcctcagtacgggtatctgacgcttaatgatggaagccaggccgtgggtcgttcgtccttttactgcctggaatatttcccgtcgcaaatgctaagaacgggtaacaacttccagttcagctacgagtttgagaacgtacctttccatagcagctacgctcacagccaaagcctggaccgactaatgaatccactcatcgaccaatacttgtactatctctcaaagactattaacggttctggacagaatcaacaaacgctaaaattcagtgtggccggacccagcaacatggctgtccagggaagaaactacatacctggacccagctaccgacaacaacgtgtctcaaccactgtgactcaaaacaacaacagcgaatttgcttggcctggggcttcttcttgggctctcaatggacgtaatagcttgatgaatcctggacctgctatggccagccacaaagaaggagaggaccgtttctttcctttgtctggatctttaatttttggcaaacaaggaactggaagagacaacgtggatgcggacaaagtcatgataaccaacgaagaagaaattaaaactactaacccggtagcaacggagtcctatggacaagtggccacaaaccaccagagtgcccaagcacaggcgcagaccggctgggttcaaaaccaaggaatacttccgggtatggtttggcaggacagagatgtgtacctgcaaggacccatttgggccaaaattcctcacacgggcggcaactttcacccttctccgctgatgggagggtttggaatgaagcacccgcctcctcagatcctcatcaaaaacacacctgtacctgcggatcctccaacggccttcaacaaggacaagctgaactctttcatcacccagtattctactggccaagtcagcgtggagatcgagtgggagctgcagaaggaaaacagcaagcgctggaacccggagatccagtacacttccaactattacaagtctaataatgttgaatttgctgttaatactggaggtgtatatagtgaaccccgccccattggcaccagatacctgactcgtaatctgtaattgcttgttaatcaataaaccgtttaattcgtttcagttgaactgcggcc

SEQ ID NO: 583 - DNA, 2601 bp, Artificial Sequence
  source: /note="Description of Artificial Sequence: Synthetic polynucleotide"
ccatcgacgtcagacgcggaagcttcgatcaactacgcggacaggtaccaaaacaaatgttctcgtcacgtgggcatgaatctgatgctgtttccctgcagacaatgcgagagactgaatcagaattcaaatatctgcttcactcacggtgtcaaagactgtttagagtgctttcccgtgtcagaatctcaacccgtttctgtcgtcaaaaaggcgtatcagaaactgtgctacattcatcacatcatgggaaaggtgccagacgcttgcactgcttgcgacctggtcaatgtggactcggatgactgtgtttctgaacaataaatgacttaaaccaggtatggctgccgatggttatcttccagattggctcgaggacaaccttagtgaaggaattcgcgagtggtgggctttgaaacctggagcccctcaacccaaggcaaatcaacaacatcaagacaacgctcgaggtcttgtgcttccgggttacaaataccttggacccggcaacggactcgacaagggggagccggtcaacgcagcagacgcggcggccctcgagcacgacaaggcctacgaccagcagctcaaggccggagacaacccgtacctcaagtacaaccacgccgacgccgagttccaggagcggctcaaagaagatacgtcttttgggggcaacctcgggcgagcagtcttccaggccaaaaagaggcttcttgaacctcttggtctggttgaggaagcggctaagacggctcctggaaagaagaggcctgtagagcagtctcctcaggaaccggactcctccgcgggtattgacaaatcgggtgcacagcccgctaaaaagagactcaatttcggtcagactggcgacacagagtcagtcccagaccctcaaccaatcggagaacctcccgcagccccctcaggtgtgggatctcttacaatggcttcaggtggtggcgcaccagtggcagacaataacgaaggtgccgatggagtgggtagttcctcgggaaattggcattgcgattcccaatggctgggggacagagtcatcaccaccagcacccgaacctgggccctgcccacctacaacaatcacctctacaagcaaatctccaacagcacatctggaggatcttcaaatgacaacgcctacttcggctacagcaccccctgggggtattttgacttcaacagattccactgccacttctcaccacgtgactggcagcgactcatcaacaacaactggggattccggcctaagcgactcaacttcaagctcttcaacattcaggtcaaagaggttacggacaacaatggagtcaagaccatcgccaataaccttaccagcacggtccaggtcttcacggactcggactatcagctcccgtacgtgctcgggtcggctcacgagggctgcctcccgccgttcccagcggacgttttcatgattcctcagtacgggtatctgacgcttaatgatggaagccaggccgtgggtcgttcgtccttttactgcctggaatatttcccgtcgcaaatgctaagaacgggtaacaacttccagttcagctacgagtttgagaacgtacctttccatagcagctacgctcacagccaaagcctggaccgactaatgaatccactcatcgaccaatacttgtactatctctcaaagactattaacggttctggacagaatcaacaaacgctaaaattcagtgtggccggacccagcaacatggctgtccagggaagaaactacatacctggacccagctaccgacaacaacgtgtctcaaccactgtgactcaaaacaacaacagcgaatttgcttggcctggagcttcttcttgggctctcaatggacgtaatagcttgatgaatcctggacctgctatggccagccacaaagaaggagaggaccgtttctttcctttgtctggatctttaatttttggcaaacaaggaactggaagagacaacgtggatgcggacaaagtcatgataaccaacgaagaagaaattaaaactactaacccggtagcaacggagtcctatggacaagtggccacaaaccaccagagtgcccaagcacaggcgcagaccggctgggttcaaaaccaaggaatacttccgggtatggtttggcaggacagagatgtgtacctgcaaggacccatttgggccaaaattcctcacacggacggcaactttcacccttctccgctgatgggagggtttggaatgaagcacccgcctcctcagatcctcatcaaaaacacacctgtacctgcggatcctccaacggccttcaacaaggacaagctgaactctttcatcacccagtattctactggccaagtcagcgtggagatcgagtgggagctgcagaaggaaaacagcaagcgctggaacccggagatccagtacacttccaactattacaagtctaataatgttgaatttgctgttaatactgaaggtgtatatagtgaaccccgccccattggcaccagatacctgactcgtaatctgtaattgcttgttaatcaataaaccgtttaattcgtttcagttgaactgcggcc

SEQ ID NO: 584 - DNA, 2601 bp, Artificial Sequence
  source: /note="Description of Artificial Sequence: Synthetic polynucleotide"
ccatcgacgtcagacgcggaagcttcgatcaactacgcggacaggtaccaaaacaaatgttctcgtcacgtgggcatgaatctgatgctgtttccctgcagacaatgcgagagactgaatcagaattcaaatatctgcttcactcacggtgtcaaagactgtttagagtgctttcccgtgtcagaatctcaacccgtttctgtcgtcaaaaaggcgtatcagaaactgtgctacattcatcacatcatgggaaaggtgccagacgcttgcactgcttgcgacctggtcaatgtggacttggatgactgtgtttctgaacaataaatgacttaaaccaggtatggctgccgatggttatcttccagattggctcgaggacaaccttagtgaaggaattcgcgagtggtgggctttgaaacctggagcccctcaacccaaggcaaatcaacaacatcaagacaacgctcgaggtcttgtgcttccgggttacaaataccttggacccggcaacggactcgacaagggggagccggtcaacgcagcagacgcggcggccctcgagcacgacaaggcctacgaccagcagctcaaggccggagacaacccgtacctcaagtacaaccacgccgacgccgagttccaggagcggctcaaagaagatacgtcttttgggggcaacctcgggcgagcagtcctccaggccaaaaagaggcttcttgaacctcttggtctggttgaggaagcggctaagacggctcctggaaagaagaggcctgtagagcagtctcctcaggaaccggactcctccgcgggtattggcaaatcgggtgcacagcccgctaaaaagagactcaatttcggtcagactggcgacacagagtcagtcccagaccctcaaccaatcggagaacctcccgcagccccctcaggtgtgggatctcttacaatggcttcaggtggtggcgcaccagtggcagacaataacgaaggtgccgatggagtgggtagttcctcgggaaattggcattgcgattcccaatggctgggggacagagtcatcaccaccagcacccgaacctgggccctgcccacctacaacaatcacctctacaagcaaatctccaacagcacatctggaggatcttcaaatgacaacgcctacttcggctacagcaccccctgggggtattttgacttcaacagattccactgccacttctcaccacgtgactggcagcgactcatcaacaacaactggggattccggcctaagcgactcaacttcaagctcttcaacattcaggtcaaagaggttacggacaacaatggagtcaagaccatcgccaataaccttaccagcacggtccaggtcttcacggactcagactatcagctcccgtacgtgctcgggtcggctcacgagggctgcctcccgccgttcccagcggacgttttcatgattcctcagtacgggtatctgacgcttaatgatggaagccaggccgtgggtcgttcgtccttttactgcctggaatatttcccgtcgcaaatgctaagaacgggtaacaacttccagttcagctacgagtttgagaacgtacctttccatagcagctacgctcacagccaaagcctggaccgactaatgaatccactcatcgaccaatacttgtactatctctcaaagactattaacggttctggacagaatcaacaaacgctaaaattcagtgtggccggatccagcaacatggctgtccagggaagaaactacatacctggacccagctaccgacaacaacgtgtctcaaccactgtgactcaaaacaacaacagcgaatttgcttggcctggagcttcttcttgggctctcaatggacgtaatagcttgatgaatcctggacctgctatggccagccacaaagaaggagaggaccgtttctttcctttgtctggatctttaatttttggcaaacaaggaactggaagagacaacgtggatgcggacaaagtcatgataaccaacgaagaagaaattaaaactactaacccggtagcaacggagtcctatggacaagtggccacaaaccaccagagtgcccaagcacaggcgcagaccggctgggttcaaaaccaaggaatacttccaggtatggtttggcaggacagagatgtgtacctgcaaggacccatttgggccaaaattcctcacacggacggcaactttcacccttctccgctgatgggagggtttggaatgaagcacccgcctcctcagatcctcatcaaaaacacacctgtacctgcggatcctccaacggccttcaacaaggacaagctgaactctttcatcacccagtattctactggccaagtcagcgtggagatcgagtgggagctgcagaaggaaaacagcaagcgctggaacccggagatccagtacacttccaactattacaagtctaataatgttgaatttgctgttaatactgaaggtgtatatagtgaaccccgccccattggcaccagatacctgactcgtaatctgtaattgcttgttaatcaataaaccgtttaattcgtttcagttgaactgcggcc

SEQ ID NO: 585 - DNA, 2601 bp, Artificial Sequence
  source: /note="Description of Artificial Sequence: Synthetic polynucleotide"
ccatcgacgtcagacgcggaagcttcgatcaactacgcggacaggtaccaaaacaaatgttctcgtcacgtgggcatgaatctgatgctgtttccctgcagacaatgcgagagactgaatcagaattcaaatatctgcttcactcacggtgtcaaagactgtttagagtgctttcccgtgtcagaatctcaacccgtttctgtcgtcaaaaaggcgtatcagaaactgtgctacattcatcacatcatgggaaaggtgccagacgcttgcactgcttgcgacctggtcaatgtggacttggatgactgtgtttctgaacaataaatgacttaaaccaggtatggctgccgatggttatcttccagattggctcgaggacaaccttagtgaaggaattcgcgagtggtgggctttgaaacctggagcccctcaacccaaggcaaatcaacaacatcaagacaacgctcgaggtcttgtgcttccgggttacaaataccttggacccggcaacggactcgacaagggggagccggtcaacgcagcagacgcggcggccctcgagcacgacagggcctacgaccagcagctcaaggccggagacaacccgtacctcaagtacaaccacgccgacgccgagttccaggagcggctcaaagaagatacgtcttttgggggcaacctcgggcgagcagtcttccaggccaaaaagaggcttcttgaacctcttggtctggttgaggaagcggctaagacggctcctggaaagaagaggcctgtagagcagtctcctcaggaaccggactcctccgcgggtattggcaaatcgggtgcacagcccgctaaaaagagactcaatttcggtcagactggcgacacagagtcagtcccagaccctcaaccaatcggagaacctcccgcagccccctcaggtgtgggatctcttacaatggcttcaggtggtggcgcaccagtggcagacaataacgaaggtgccgatggagtgggtagttcctcgggaaattggcattgcgattcccaatggctgggggacagagtcatcaccaccagcacccgaacctgggccctgcccacctacaacaatcacctctacaagcaaatctccaacagcacatctggaggatcttcaaatgacaacgcctacttcggctacagcaccccctgggggtattttgacttcaacagattccactgccacttctcaccacgtgactggcagcgactcatcaacaacaactggggattccggcctaagcgactcaacttcaagctcttcaacattcaggtcaaagaggttacggacaacaatggagtcaagaccatcgccaataaccttaccagcacggtccaggtcttcacggactcagactatcagctcccgtacgtgctcgggtcggctcacgagggctgcctcccgccgttcccagcggacgttttcatgattcctcagtacgggtatctgacgcttaatgatggaagccaggccgtgggtcgttcgtccttttactgcctggaatatttcccgtcgcaaatgctaagaacgggtaacaacttccagttcagctacgagtttgagaacgtacctttccatagcagctacgctcacagccaaagcctggaccgactaatgaatccactcatcgaccaatacttgtactatctctcaaagactattaacggttctggacagaatcaacaaacgctaaaattcagtgtggccggacctagcaacatggctgtccagggaagaaactacatacctggacccagctaccgacaacaacgtgtctcaaccactgtgactcaaaacaacaacagcgaatttgcttggcctggagcttcttcttgggctctcaatggacgtaatagcttgatgaatcctggacctgctatggccagccacaaagaaggagaggaccgtttctttcctttgtctggatctttaatttttggcaaacaaggaactggaagagacaacgtggatgcggacaaagtcatgataaccaacgaagaagaaattaaaactactaacccggtagcaacggagtcctatggacaagtggccacaaaccaccagagtgcccaagcacaggcgcagaccggctgggttcaaaaccaaggaatacttccgggtatggtttggcaggacagagatgtgtacctgcaaggacccatttgggccaaaattcctcacacggacggcaactttcacccttctccgctgatgggagggtttggaatgaagcacccgcctcctcagatcctcatcaaaaacacacctgtacctgcggatcctccaacggccttcaacaaggacaagctgaactctttcatcacccagtattctactggccaagtcagcgtggagatcgagtgggagctgcagaagaaaaacagcaagcgctggaacccggagatccagtacacttccaactattacaagtctaataatgttgaatttgctgttaacactgaaggtgtatatagtgaaccccgccccattggcaccagatacctgactcgtaatctgtaattgcttgttaatcaataaaccgtttaattcgtttcagttgaactgcggcc

SEQ ID NO: 586 - DNA, 2601 bp, Artificial Sequence
  source: /note="Description of Artificial Sequence: Synthetic polynucleotide"
ccatcgacgtcagacgcggaagcttcgatcaactacgcggacaggtaccaaaacaaatgttctcgtcacgtgggcatgaatctgatgctgtttccctgcagacaatgcgagagactgaatcagaattcaaatatctgcttcactcacggtgtcaaagactgtttagagtgctttcccgtgtcagaatctcaacccgtttctgtcgtcaaaaaggcgtatcagaaactgtgctacattcatcacatcatgggaaaggtgccagacgcttgcactgcttgcgacctggtcaatgtggacttggatgactgtgtttctgaacaataaatgacttaaaccaggtatggctgccgatggttatcttccagattggctcgaggacaaccttagtgaaggaattcgcgagtggtgggctttgaaacctggagcccctcaacccaaggcaaatcaacaacatcaagacaacgctcgaggtcttgtgcttccgggttacaaataccttggacccggcaacggactcgacaagggggagccggtcaacgcagcagacgcggcggccctcgagcacgacaaggcctacgaccagcagctcaaggccggagacaacccgtacctcaagtacaaccacgccgacgccgagttccaggagcggctcaaagaagatacgtcttttgggggcaacctcgggcgagcagtcttccaggccaaaaagaggcttcttgaacctcttggtctggttgaggaagcggctaagacggctcctggaaagaagaggcctgtagagcagtctcctcaggaaccggactcctccgcgggtattggcaaatcgggtgcacagcccgctaaaaagagactcaatttcggtcagactggcgacacagagtcagtcccagaccctcaaccaatcggagaacctcccgcagccccctcaggtgtgggatctcttacaatggcttcaggtggtggcgcaccagtggcagacaataacgaaggtgccgatggagtgggtagttcctcgggaaattggcattgcgattcccaatggctgggggacagagtcatcaccaccagcacccgaacctgggccctgcccacctacaacaatcacctctacaagcaaatctccaacagcacatctggaggatcttcaaatgacaacgcctacttcggctacagcaccccctgggggtattttgacttcaacagattccactgccacttctcaccacgtgactggcagcgactcatcaacaacaactggggattccggcctaagcgactcaacttcaagctcttcaacattcaggtcaaagaggttacggacaacaatggagtcaagaccatcgccaataaccttaccagcacggtccaggtcttcacggactcagactatcagctcccgtacgtgctcgggtcggctcacgagggctgcctcccgccgttcccagcggacgttttcatgattcctcagtacgggtatctgacgcttaatgatggaagccaggccgtgggtcgttcgtccttttactgcctggaatatttcccgtcgcaaatgctaagaacgggtaacaacttccagttcagctacgagtttgagaacgtacctttccatagcagctacgctcacagccaaagcctggaccgactaatgaatccactcatcgaccaatacttgtactatctctcaaagactattaacggttctggacagaatcaacaaacgctaaaattcagtgtggccggacccagcaacatggctgtccagggaagaaactacatacctggacccagctaccgacaacaacgtgtctcaaccactgtgactcaaaacaacaacagcgaatttgcttggcctggagcttcttcttgggctctcaatggacgtaatagcttgatgaatcctggacctgctatggccagccacaaagaaggagaggaccgtttctttcctttgtctggatctttaatttttggcaaacaaggaactggaagagacaacgtggatgcggacaaagtcatgataaccaacgaagaagaaattaaaactactaacccggtagcaacggagtcctatggacaagtggccacaaaccaccagagtgcccaagcacgggcgcagaccggctgggttcaaaaccaaggaatacttccgggtatggtttggcaggacagagatgtgtacctgcaaggacccatttgggccaaaattcctcacacggacggcaactttcacccttctccgctgatgggagggtttggaatgaagcacccgcctcctcagatcctcatcaaaaacacacctgtacctgcggatcctccaacggccttcaacaaggacaagctgaactctttcatcacccagtattctactggccaagtcagcgtggagatcgagtgggagctgcagaaggaaaacagcaagcgctggaacccggagatccagtacacttccaactattacaagtctaataatgttgaatttgctgttaatactgaaggtgtatatagtgaaccccgccccattggcaccagatacctgactcgtaatctgtaattgcttgttaatcaataaaccgtttaattcgtttcagttgaactgcggcc

SEQ ID NO: 587 - DNA, 2601 bp, Artificial Sequence
  source: /note="Description of Artificial Sequence: Synthetic polynucleotide"
ccatcgacgtcagacgcggaagcttcgatcaactacgcggacaggtaccaaaacaaatgttctcgtcacgtgggcatgaatctgatgctgtttccctgcagacaatgcgagagactgaatcagaattcaaatatctgcttcactcacggtgtcaaagactgtttagagtgctttcccgtgtcagaatctcaacccgtttctgtcgtcaaaaaggcgtatcagaaactgtgctacattcatcacatcatgggaaaggtgccagacgcttgcactgcttgcgacctggtcaatgtggacttggatgactgtgtttctgaacaataaatgacttaaaccaggtatggctgccgatggttatcttccagattggctcgaggacaaccttagtgaaggaattcgcgagtggtgggctttgaaacctggagcccctcaacccaaggcaaatcaacaacatcaagacaacgctcgaggtcttgtgcttccgggttacaaataccttggacccggcaacggactcgacaagggggagccggtcaacgcagtagacgcggcggccctcgagcacgacaaggcctacgaccagcagctcaaggccggagacaacccgtacctcaagtacaaccacgccgacgccgagttccaggagcggctcaaagaagatacgtcttttgggggcaacctcgggcgagcagtcttccaggccaaaaagaggcttcttgaacctcttggtctggttgaggaagcggctaagacggctcctggaaagaagaggcctgtagagcagtctcctcaggaaccggactcctccgcgggtattggcaaatcgggtgcacagcccgctaaaaagagactcaatttcggtcagactggcgacacagagtcagtcccagaccctcaaccaatcggagaacctcccgcagccccctcaggtgtgggatctcttacaatggcttcaggtggtggcgcaccagtggcagacaataacgaaggtgccgatggagtgggtagttcctcgggaaattggcattgcgattcccaatggctgggggacagagtcatcaccaccagcacccgaacctgggccctgcccacctacaacaatcacctctacaagcaaatctccaacagcacatctggaggatcttcaaatgacaacgcctacttcggctacagcaccccctgggggtattttgacttcaacagattccactgccacttctcaccacgtgactggcagcgactcatcaacaacaactggggatttcggcctaagcgactcaacttcaagctcttcaacattcaggtcaaagaggttacggacaacaatggagtcaagaccatcgccaataaccttaccagcacggtccaggtcttcacggactcagactatcagctcccgtacgtgctcgggtcggctcacgagggctgcctcccgccgttcccagcggacgttttcatgattcctcagtacgggtatctgacgcttaatgatggaagccaggccgtgggtcgttcgtccttttactgcctggaatatttcccgtcgcaaatgctaagaacgggtaacaacttccagttcagctacgagtttgagaacgtacctttccatagcagctacgctcacagccaaagcctggaccgactaatgaatccactcatcgaccaatacttgtactatctctcaaagactattaacggttctggacagaatcaacaaacgctaaaattcagtgtggccggacccagcaacatggctgtccagggaagaaactacatacctggacccagctaccgacaacaacgtgtctcaaccactgtgactcaaaacaacaacagcgaatttgcttggcctggagcttcttcttgggctctcaatggacgtaatagcttgatgaatcctggacctgctatggccagccacaaagaaggagaggaccgtttctttcctttgtctggatctttaatttttggcaaacaaggaactggaagagacaacgtggatgcggacaaagtcatgataaccaacgaagaagaaattaaaactactaacccggtagcaacggagtcctatggacaagtggccacaaaccaccagagtgcccaagcacaggcgcagaccggctgggttcaaaaccaaggaatacttccgggtatggtttggcaggacagagatgtgtacctgcaaggacccatttgggccaaaattcctcacacggacggcaactttcacccttctccgctgatgggagggtttggaatgaagcacccgcctcctcagatcctcatcaaaaacacacctgtacctgcggatcctccaacggccttcaacaaggacaagctgaactctttcatcacccagtattctactggccaagtcagcgtggagatcgagtgggagctgcagaaggaaaacagcaagcgctggaacccggagatccagtacacttccaactattacaagtctaataatgttgaatttgctgttaatactgaaggtgtatatagtgaaccccgccccattggcaccagatacctgactcgtaatctgtaattgcttgttaatcaataaaccgtttaattcgtttcagttgaactgcggcc

SEQ ID NO: 588 - DNA, 2580 bp, Artificial Sequence
  source: /note="Description of Artificial Sequence: Synthetic polynucleotide"
ccatcgacgtcagacgcggaagcttcgatcaactacgcggacaggtaccaaaacaaatgttctcgtcacgtgggcatgaatctgatgctgtttccctgcagacaatgcgagagactgaatcagaattcaaatatctgcttcactcacggtgtcaaagactgtttagagtgctttcccgtgtcagaatctcaacccgtttctgtcgtcaaaaaggcgtatcagaaactgtgctacattcatcacatcatgggaaaggtgccagacgcttgcactgcttgcgacctggtcaatgtggacttggatgactgtgtttctgaacaataaatgacttaaaccaggtatggctgccgatggttatcttccagattggctcgaggacaaccttagtgaaggaattcgcgagtggtgggctttgaaacctggagcccctcaacccaaggcaaatcaacaacatcaagacaacgctcgaggtcttgtgcttccgggttacaaataccttggacccggcaacggactcgacaagggggagccggtcaacgcagcagacgcggcggccctcgagcacgacaaggcctacgaccagcagctcaaggccggagacaacccgtacctcaagtacaaccacgccgacgccgagttccaggagcggctcaaagaagatacgtcttttgggggcaacctcgggcgagcagtcttccaggccaaaaagaggcttcttgaacctcttggtctggttgaggaagcggctaagacggctcctggaaagaagaggcctgtagagcagtctcctcgggaaccggactcctccgcgggtattggcaaatcgggtgcacagcccgctaaaaagagactcaatttcggtcagactggcgacacagagtcagtcccagaccctcaaccaatcggagaacctcccgcagccccctcaggtgtgggatctcttacaatggcttcaggtggtggcgcaccagtggcagacaataacgaaggtgccgatggagtgggtagttcctcgggaaattggcattgcgattcccaatggctgggggacagagtcatcaccaccagcacccgaacctgggccctgcccacctacaacaatcacctctacaagcaaatctccaacagcacatctggaggatcttcaaatgacaacgcctacttcggctacagcaccccctgggggtattttgacttcaacagattccactgccacttctcaccacgtgactggcagcgactcatcaacaacaactggggattccggcctaagcgactcaacttcaagctcttcaacattcaggtcaaagaggttacggacaacaatggagtcaagaccatcgccaataaccttaccagcacggtccaggtcttcacggactcagactatcagctcccgtacgtgctcgggtcggctcacgagggctgcctcccgccgttcccagcggacgttttcatgattcctcagtacgggtatctgacgcttaatgatggaagccaggccgtgggtcgttcgtccttttactgcctggaatatttcccgtcgcaaatgctaagaacgggtaacaacttccagttcagctacgagtttgagaacgtacctttccatagcagctacgctcacagccaaagcctggaccgactaatgaatccactcatcgaccaatacttgtactatctctcaaagactattaacggttctggacagaatcaacaaacgctaaaattcagtgtggccggacccagcaacatggctgtccagggaagaaactacatacctggacccagctaccgacaacaacgtgtctcaaccactgtgactcaaaacaacaacagcgaatttgcttggcctggagcttcttcttgggctctcaatggacgtaatagcttgatgaatcctggacctgctatggccagccacaaagaaggagaggaccgtttctttcctttgtctggatctttaatttttggcaaacaaggaactggaagagacaacgtggatgcggacaaagtcatgataaccaacgaagaagaaattaaaactactaacccggtagcaacggagtcctatggacaagtggccacaaaccaccagagtgcccaagcacaggcgcagaccggctgggttcaaaaccaaggaatacttccgggtatggtttggcaggacagagatgtgtacctgcaaggacccatttgggccaaaattcctcacacggacggcaactttcacccttctccgctgatgggagggtttggaatgaagcacccgcctcctcagatcctcatcaaaaacacacctgtacctgcggatcctccaacggccttcaacaaggacaagctgaactctttcatcacccagtattctactggccaagtcagcgtggagatcgagtgggaactgcagaaggaaaacagcaagcgctggaacccggagatccagtacacttccaactattacaagtctaataatgttgaatttgctgttaatactgaaggtgtatatagtgaaccccgccccattggcaccagatacctgactcgtaatctgtaattgcttgttaatcaataaaccgtttaatt

SEQ ID NO: 589 - DNA, 2601 bp, Artificial Sequence
  source: /note="Description of Artificial Sequence: Synthetic polynucleotide"
ccatcgacgtcagacgcggaagcttcgatcaactacgcggacaggtaccaaaacaaatgttctcgtcacgtgggcatgaatctgatgctgtttccctgcagacaatgcgagagactgaatcagaattcaaatatctgcttcactcacggtgtcaaagactgtttagagtgctttcccgtgtcagaatctcaacccgtttctgtcgtcaaaaaggcgtatcagaaactgtgctacattcatcacatcatgggaaaggtgccagacgcttgcactgcttgcgacctggtcaatgtggacttggatgactgtgtttctgaacaataaatgacttaaaccaggtatggctgccgatggttatcttccagattggctcgaggacaaccttagtgaaggaattcgcgagtggtgggctttgaaacctggagcccctcaacccaaggcaaatcaacaacatcaagacaacgctcgaggtcttgtgcttccgggttacaaataccttggacccggcaacggactcgacaagggggagccggtcaacgcagcagacgcggcggccctcgagcacgacaaggcctacgaccagcagctcaaggccggagacaacccgtacctcaagtacaaccacgccgacgccgagttccaggagcggctcaaagaagatacgtcttttgggggcaacctcgggcgagcagtctttcaggccaaaaagaggcttcttgaacctcttggtctggttgaggaagcggctaagacggctcctggaaagaagaggcctgtagagcagtctcctcaggaaccggactcctccgcgggtattggcaaatcgggtgcacagcccgctaaaaagagactcaatttcggtcagactggcgacacagagtcagtcccagaccctcaaccaatcggagaacctcccgcagccccctcaggtgtgggatctcttacaatggcttcatgtggtggcgcaccagtggcagacaataacgaaggtgccgatggagtgggtagttcctcgggaaattggcattgcgattcccaatggctgggggacagagtcatcaccaccagcacccgaacctgggccctgcccacctacaacaatcacctctacaagcaaatctccaacagcacatctggaggatcttcaaatgacaacgcctacttcggctacagcaccccctgggggtattttgacttcaacagattccactgccacttctcaccacgtgactggcagcgactcatcaacaacaactggggattccggcctaagcgactcaacttcaagctcttcaacattcaggtcaaagaggttacggacaacaatggagtcaagaccatcgccaataaccttaccagcacggtccaggtcttcacggactcagactatcagctcccgtacgtgctcgggtcggctcacgagggctgcctcccgccgttcccagcggacgttttcatgattcctcagtacgggtatctgacgcttaatgatggaagccaggccgtgggtcgttcgtccttttactgcctggaatatttcccgtcgcaaatgctaagaacgggtaacaacttccagttcagctacgagtttgagaacgtacctttccatagcagctacgctcacagccaaagcctggaccgactaatgaatccactcatcgaccaatacttgtactatctctcaaagactattaacggttctggacagaatcaacaaacgctaaaattcagtgtggccggacccagcaacatggctgtccagggaagaaactacatacctggacccagctaccgacaacaacgtgtctcaaccactgtgactcaaaacaacaacagcgaatttgcttggcctggagcttcttcttgggctctcaatggacgtaatagcttgatgaatcctggacctgctatggccagccacaaagaaggagaggaccgtttctttcctttgtctggatctttaatttttggcaaacaaggaactggaagagacaacgtggatgcggacaaagtcatgataaccaacgaagaagaaattaaaactactaacccggtagcaacggagtcctatggacaagtggccacaaaccaccagagtgcccaagcacaggcgcagaccggctgggttcaaaaccaaggaatacttccgggtatggtttggcaggacagagatgtgtacctgcaaggacccatttgggccaaaattcctcacacggacggcaactttcacccttctccgctgatgggagggtttggaatgaagcacccgcctcctcagatcctcatcaaaaacacacctgtacctgcggatcctccaacggccttcaacaaggacaagctgaactctttcatcacccagtattctactggccaagtcagcgtggagatcgagtgggagctgcagaaggaaaacagcaagcgctggaacccggagatccagtacacttccaactattacaagtctaataatgttgaatttgctgttaatactgaaggtgtatatagtgaaccccgccccattggcaccagatacctgactcgtaatctgtaattgcttgttaatcaataaaccgtttaattcgtttcagttgaactgcggcc

SEQ ID NO: 590 - DNA, 2601 bp, Artificial Sequence
  source: /note="Description of Artificial Sequence: Synthetic polynucleotide"
ccatcgacgtcagacgcggaagcttcgatcaactacgcggacaggtaccaaaacaaatgttctcgtcacgtgggcatgaatctgatgctgtttccctgcagacaatgcgagagactgaatcagaattcaaatatctgcttcactcacggtgtcaaagactgtttagagtgctttcccgtgtcagaatctcaacccgtttctgtcgtcaaaaaggcgtatcagaaactgtgctacattcatcacatcatgggaaaggtgccagacgcttgcactgcttgcgacctggtcaatgtggacttggatgactgtgtttctgaacaataaatgacttaaaccaggtatggctgccgatggttatcttccagattggctcgaggacaaccttagtgaaggaattcgcgagtggtgggctttgaaacctggagcccctcaacccaaggcaaatcaacaacatcaagacaacgctcgaggtcttgtgcttccgggttacaaataccttggacccggcaacggactcgacaagggggagccgatcaacgcagcagacgcggcggccctcgagcacgacaaggcctacgaccagcagctcaaggccggagacaacccgtacctcaagtacaaccacgccgacgccgagttccaggagcggctcaaagaagatacgtcttttgggggcaacctcgggcgagcagtcttccaggccaaaaagaggcttcttgaacctcttggtctggttgaggaagcggctaagacggctcctggaaagaagaggcctgtagagcagtctcctcaggaaccggactcctccgcgggtattggcaaatcgggtgcacagcccgctaaaaagagactcaatttcggtcagactggcgacacagagtcagtcccagaccctcaaccaatcggagaacctcccgcagccccctcaggtgtgggatctcttacaatggcttcaggtggtggcgcaccagtggcagacaataacgaaggtgccgatggagtgggtagttcctcgggaaattggcattgcgattcccaatggctgggggacagagtcatcaccaccagcacccgaacctgggccctgcccacctacaacaatcacctctacaagcaaatctccaacagcacatctggaggatcttcaaatgacaacgcctacttcggctacagcaccccctgggggtattttgacttcaacagattccactgccacttctcaccacgtgactggcagcgactcatcaacaacaactggggattccggcctaagcgactcaacttcaagctcttcaacattcaggtcaaagaggttacggacaacaatggagtcaagaccatcgccaataaccttaccagcacggtccaggtcttcacggactcagactatcagctcccgtacgtgctcgggtcggctcacgagggctgcctcccgccgttcccagcggacgttttcatgattcctcagtacgggtatctgacgcttaatgatggaagccaggccgtgggtcgttcgtccttttactgcctggaatatttcccgtcgcaaatgctaagaacgggtaacaacttccagttcagctacgagtttgagaacgtacctttccatagcagctacgctcacagccaaagcctggaccgactaatgaatccactcatcgaccaatacttgtactatctctcaaagactattaacggttctggacagaatcaacaaacgctaaaattcagtgtggccggacccagcaacatggctgtccagggaagaaactacatacctggacccagctaccgacaacaacgtgtctcaaccactgtgactcaaaacaacaacagcgaatttgcttggcctggagcttcttcttgggctctcaatggacgtaatagcttgatgaatcctggacctgctatggccagccacaaagaaggagaggaccgtttctttcctttgtctggatctttaatttttggcaaacaaggaactggaagagacaacgtggatgcggacaaagtcatgataaccaacgaagaagaaattaaaactactaacccggtagcaacggagtcctatggacaagtggccacaaaccaccagagtgcccaagcacaggcgcagaccggctgggttcaaaaccaaggaatacttccgggtatggtttggcaggacagagatgtgtacctgcaaggacccatttgggccaaaattcctcacacgtacggcaactttcacccttctccgctgatgggagggtttggaatgaagcacccgcctcctcagatcctcatcaaaaacacacctgtacctgcggatcctccaacggccttcaacaaggacaagctgaactctttcatcacccagtattctactggccaagtcagcgtggagatcgagtgggagctgcagaaggaaaacagcaagcgctggaacccggagatccagtacacttccaactattacaagtctaataatgttgaatttgctgttaatactgaaggtgtatatagtgaaccccgccccattggcaccagatacctgactcgtaatctgtaattgcttgttaatcaataaaccgtttaattcgtttcagttgaactgcggcc

SEQ ID NO: 591 - DNA, 2601 bp, Artificial Sequence
  source: /note="Description of Artificial Sequence: Synthetic polynucleotide"
ccatcgacgtcagacgcggaagcttcgatcaactacgcggacaggtaccaaaacaaatgttctcgccacgtgggcatgaatctgatgctgtttccctgcagacaatgcgagagactgaatcagaattcaaatatctgcttcactcacggtgtcaaagactgtttagagtgctttcccgtgtcagaatctcaacccgtttctgtcgtcaaaaaggcgtatcagaaactgtgctacattcatcacatcatgggaaaggtgccagacgcttgcactgcttgcgacctggtcaatgtggacttggatgactgtgtttctgaacaataaatgacttaaaccaggtatggctgccgatggttatcttccagattggctcgaggacaaccttagtgaaggaattcgcgagtggtgggctttgaaacctggagcccctcaacccaaggcaaatcaacaacatcaagacaacgctcgaggtcttgtgcttccgggttacaaataccttggacccggcaacggactcgacaagggggagccggtcaacgcagcagacgcggcggccctcgagcacgacaaggcctacgaccagcagctcaaggccggagacaacccgtacctcaagtacaaccacgccgacgccgagttccaggagcggctcaaagaagatacgtcttttgggggcaacctcgggcgagcagtcttccaggccaaaaagaggcttcttgaacctcttggtctggttgaggaagcggctaagacggctcctggaaagaagaggcctgtagagcagtctcctcaggaaccggactcctccgcgggtattggcaaatcgggtgcacagcccgctaaaaagagactcaatttcggtcagactggcgacacagagtcagtcccagaccctcaaccaatcggagaacctcccgctgccccctcaggtgtgggatctcttacaatggcttcaggtggtggcgcaccagtggcagacaataacgaaggtgccgatggagtgggtagttcctcgggaaattggcattgcgattcccaatggctgggggacagagtcatcaccaccagcacccgaacctgggccctgcccacctacaacaatcacctctacaagcaaatctccaacagcacatctggaggatcttcaaatgacaacgcctacttcggctacagcaccccctgggggtattttgacttcaacagattccactgccacttctcaccacatgactggcagcgactcatcaacaacaactggggattccggcctaagcgactcaacttcaagctcttcaacattcaggtcaaagaggttacggacaacaatggagtcaagaccatcgccaataaccttaccagcacggtccaggtcttcacggactcagactatcagctcccgtacgtgctcgggtcggctcacgagggctgcctcccgccgttcccagcggacgttttcatgattcctcagtacgggtatctgacgcttaatgatggaagccaggccgtgggtcgttcgtccttttactgcctggaatatttcccgtcgcaaatgctaagaacgggtaacaacttccagttcagctacgagtttgagaacgtacctttccatagcagctacgctcacagccaaagcctggaccgactaatgaatccactcatcgaccaatacttgtactatctctcaaagactattaacggttctggacagaatcaacaaacgctaaaattcaatgtggccggacccagcaacatggctgtccagggaagaaactacatacctggacccagctaccgacaacaacgtgtctcaaccactgtgactcaaaacaacaacagcgaatttgcctggcctagagcttcttcttgggctctcaatggacgtaatagcttgatgaatcctggacctgctatggccagccacaaagaaggagaggaccgtttctttcctttgtctggatctttaatttttggcaaacaaggaactggaagagacaacgtggatgcggacaaagtcatgataaccaacgaagaagaaattaaaactactaacccggtagcaacggagtcctatggacaagtggccacaaaccaccagagtgcccaagcacaggcgcagaccggctgggttcaaaaccaaggaatacttccgggtatggtttggcaggacagagatgtgtacctgcaaggacccatttgggccaaaattcctcacacggacggcaactttcacccttctccgctgatgggagggtttggaatgaagcacccgcctcctcagatcctcatcaaaaacacacctgtacctgcggatcctccaacggccttcaacaaggacaagctgaactctttcatcacccagtattctactggccaagtcagcatggagatcgagtgggagctgcagaaggaaaacagcaagcgctggaacccggagatccagtacacttccaactattacaagtctaataatgttgaatttgctgttaatactgaaggtgtatatagtgaaccccgccccattggcaccagatacctgactcgtaatctgtaattgcttgttaatcaataaaccgtttaattcgtttcagttgaactgcggcc

SEQ ID NO: 592 - DNA, 2601 bp, Artificial Sequence
  source: /note="Description of Artificial Sequence: Synthetic polynucleotide"
ccatcgacgtcagacgcggaagcttcgatcaactacgcggacaggtaccaaaacaaatgttctcgtcacgtgggcatgaatctgatgctgtttccctgcagacaatgcgagagactgaatcagaattcaaatatctgcttcactcacggtgtcaaagactgtttagagtgctttcccgtgtcagaatctcaacccgtttctgtcgtcaaaaaggcgtatcagaaactgtgctacattcatcacatcatgggaaaggtgccagacgcttgcactgcttgcgacctggtcaatgtggacttggatgactgtgtttctgaacaataaatgacttaaaccaggtatggctgccgatggttatcttccagattggctcgaggacaaccttagtgaaggaattcgcgagtggtgggctttgaaacctggagcccctcaacccaaggcaaatcaacaacatcaagacaacgctcgaggtcttgtgcttccgggttacaaataccttggacccggcaacggactcgacaagggggagccggtcaacgcagcagacgcggcggccctcgagcacgacaaggcctacgaccagcagctcaaggccggagacaacccgtacctcaagtacaaccacgccgacgccgagttccaggagcggctcaaagaagatacgtcttttgggggcaacctcgggcgagcagtcttccaggccaaaaagaggcttcttgaacctcttggtctggttgaggaagcggctaagacggctcctggaaagaagaggcctgtagagcagtctcctcaggaaccggactcctccgcgggtattggcaaatcgggtgcacagcccgctaaaaagagactcaatttcggtcagactggcgacacagagtcagtcccagaccctcaaccaatcggagaacctcccgcagccccctcaggtgtgggatctcttacaatggcttcaggtggtggcgcaccagtggcagacaataacgaaggtgccgatggagtgggtagttcctcgggaaattggcattgcgattcccaatggctgggggacagagtcatcaccaccagcacccgaacctgggccctgcccacctacaacaatcacctctacaagcaaatctccaacagcacatctggaggatcttcaaatgacaacgcctacttcggctacagcaccccctgggggtattttgacttcaacagattccactgccacttctcaccacgtgactggcagcgactcatcaacaacaactggggattccggcctaagcgactcaacttcaagctcttcaacattcaggtcaaagaggttacggacaacaatggagtcaagaccatcgccaataaccttaccagcacggtccaggtcttcacggactcagactatcagctcccgtacgtgctcgggtcggctcacgagggctgcctcccgccgttcccagcggacgttttcatgattcctcagtacgggtatctgacgcttaatgatggaagccaggccgtgggtcgttcgtccttttactgcctggaatatttcccgtcgcaaatgctaagaacgggtaacaacttccagttcagctacgagtttgagaacgtacctttccatagcagctacgctcacagccaaagcctggaccgactaatgaatccactcatcgaccaatacttgtactatctctcaaagactattaacggttctggacagaatcaacaaacgctaaaattcagtgtggccggacccagcaacatggctgtccagggaagaaactacatacctggacccagctaccgacaacaacgtgtctcaaccactgtgactcaaaacaacaacagcgaatttgcttggcctagagcttcttcttgggctctcaatggacgtaatagcttgatgaatcctggacctgctatggccagccacaaagaaggagaggaccgtttctttcctttgtctggatctttaatttttggcaaacaaggaactggaagagacaacgtggatgcggacaaagtcatgataaccaacgaagaagaaattaaaactactaacccggtagcaacggagtcctatggacaagtggccacaaaccaccagagtgcccaagcacaggcgcagaccggctgggttcaaaaccaaggaatacttccgggtatggtttggcaggacagagatgtgtacctgcaaggacccatttgggccaaaattcctcacacggacggcaactttcacccttctccgctgatgggagggtttggaatgaagcacccgcctcctcagatcctcatcaaaaacacacctgtacctgcggatcctccaacggccttcaacaaggacaagctgaactctttcatcacccagtattctactggccaagtcagcgtggagatcgagtgggagctgcagaaggaaaacagcaagcgctggaacccggagatccagtacacttccaactattacaagtctaataatgttgaatttgctgttaatactgaaggtgtatatagtgaaccccgccccattggcaccagatacctgactcgtaatctgtaattgcttgttaatcaataaaccgtttaattcgtttcagttgaactgcggcc

SEQ ID NO: 593 - DNA, 2601 bp, Artificial Sequence
  source: /note="Description of Artificial Sequence: Synthetic polynucleotide"
ccatcgacgtcagacgcggaagcttcgatcaactacgcggacaggtaccaaaacaaatgttctcgtcacgtgggcatgaatctgatgctgtttccctgcagacaatgcgagagactgaatcagaattcaaatatctgcttcactcacggtgtcaaagactgtttagagtgctttcccgtgtcagaatctcaacccgtttctgtcgtcaaaaaggcgtatcagaaactgtgctacattcatcacatcatgggaaaggtgccagacgcttgcactgcttgcgacctggtcaatgtggacttggatgactgtgtttctgaacaataaatgacttaaaccaggtatggctgccgatggttatcttccagattggctcgaggacaaccttagtgaaggaattcgcgagtggtgggctttgaaacctggagcccctcaacccaaggcaaatcaacaacatcaagacaacgctcgaggtcttgtgcttccgggttacaaataccttggacccggcaacggactcgacaagggggagccggtcaacgcagcagacgcggcggccctcgagcacgacaaggcctacgaccagcagctcaaggccggagacaacccgtacctcaagtacaaccacgccgacgccgagttccaggagcggctcaaagaagatacgtcttttgggggcaacctcgggcgagcagtcttccaggccaaaaagaggcttcttgaacctcttggtctggttgaggaagcggctaagacggctcctggaaagaagaggcctgtagagcagtctcctcaggaaccggactcctccgcgggtattggcaaatcgggtgcacagcccgctaaaaagagactcaatttcggtcagactggcgacacagagtcagtcccagaccctcaaccaatcggagaacctcccgcagccccctcaggtgtgggatctcttacaatggcttcaggtggtggcgcaccagtggcagacaataacgaaggtgccgatggagtgggtagttcctcgggaaattggcattgcgattcccaatggctgggggacagagtcatcaccaccagcacccgaacctgggccctgcccacctacaacaatcacctctacaagcaaatctccaacagcacatctggaggatcttcaaatgacaacgcctacttcggctacagcaccccctgggggtattttgacttcaacagattccactgccacttctcaccacgtgactggcagcgactcatcaacaacaactggggattccggcctaagcgactcaacttcaagctcttcaacattcaggtcaaagaggttacggacaacaatggagtcaagaccatcgccaataaccttaccagcacggtccaggtcttcacggactcagactatcagctcccgtacgtgctcgggtcggctcacgagggctgcctcccgccgttcccagcggacgttttcatgattcctcagtacgggtatctgacgcttaatgatggaagccaggccgtgggtcgttcgtccttttactgcctggaatatttcccgtcgcaaatgctaagaacgggtaacaacttccagttcagctacgagtttgagaacgtacctttccatagcagctacgctcacagccaaagcctggaccgactaatgaatccactcatcgaccaatacttgtactatctctcaaagactattaacggttctggacagaatcaacaaacgctaaaattcagtgtggccggacccagcaacatggctgtccagggaagaaactacatacctggacccagctaccgacaacaacgtgtctcaaccactgtgactcaaaacaacaacagcgaatttgcttggcctagagcttcttcttgggctctcaatggacgtaatagcttgatgaatcctggacctgctatggccagccacaaagaaggagaggaccgtttctttcctttgtctggatctttaatttttggcaaacaaggaactggaagagacaacgtggatgcggacaaagtcatgataaccaacgaagaagaaattaaaactactaacccggtagcaacggagtcctatggacaagtggccacaaaccaccagagtgcccaagcacaggcgcagaccggctgggttcaaaaccaaggaatacttccgggtatggtttggcaggacagagatgtgtacctgcaaggacccatttgggccaaaattcctcacacggacggcaactttcacccttctccgctgatgggagggtttggaatgaagcacccgcctcctcagatcctcatcaaaaacacacctgtacctgcggatcctccaacggccttcaacaaggacaagctgaactctttcatcacccagtattctactggccaagtcagcgtggagatcgagtgggagcggcagaaggaaaacagcaagcgctggaacccggagatccagtacacttccaactattacaagtctaataatgttgaatttgctgttaatactgaaggtgtatatagtgaaccccgccccattggcaccagatacctgactcgtaatctgtaattgcttgttaatcaataaaccgtttaattcgtttcagttgaactgcggcc

SEQ ID NO: 594 - DNA, 2601 bp, Artificial Sequence
  source: /note="Description of Artificial Sequence: Synthetic polynucleotide"
ccatcgacgtcagacgcggaagcttcgatcaactacgcggacaggtaccaaaacaaatgttctcgtcacgtgggcatgaatctgatgctgtttccctgcagacaatgcgagagactgaatcagaattcaaatatctgcttcactcacggtgtcaaagactgtttagagtgctttcccgtgtcagaatctcaacccgtttctgtcgtcaaaaaggcgtatcagaaactgtgctacattcatcacatcatgggaaaggtgccagacgcttgcactgcttgcgacctggtcaatgtggacttggatgactgtgtttctgaacaataaatgacttaaaccaggtatggctgccgatggttatcttccagattggctcgaggacaaccttagtgaaggaattcgcgagtggtgggctttgaaacctggagcccctcaacccaaggcaaatcaacaacatcaagacaacgctcgaggtcttgtgcttccgggttacaaataccttggacccggcaacggactcgacaagggggagccggtcaacgcagcagacgcggcggccctcgagcacgacaaggcctacgaccagcagctcaaggccggagacaacccgtacctcaagtacaaccacgccgacgccgagttccaggagcggctcaaagaagatacgtcttttgggggcaacctcgggcgagcagtcttccaggccaaaaagaggcttcttgaacctcttggtctggttgaggaagcggctaagacggctcctggaaagaagaggcctgtagagcagtctcctcaggaaccggactcctccgcgggtattggcaaatcgggtgcacagcccgctaaaaagagactcaatttcggtcagactggcgacacagagtcagtcccagaccctcaaccaatcggagaacctcccgcagccccctcaggtgtgggatctcttacaatggcttcaggtggtggcgcaccagtggcagacaataacgaaggtgccgatggagtgggtagttcctcgggaaattggcattgcgattcccaatggctgggggacagagtcatcaccaccagcacccgaacctgggccctgcccacctacaacaatcacctctacaagcaaatctccaacagcacatctggaggatcttcaaatgacaacgcctacttcggctacagcaccccctgggggtattttgacttcaacagattccactgccacttctcaccacgtgactggcagcgactcatcaacaacaactggggattccggcctaagcgactcaacttcaagctcttcaacattcaggtcaaagaggttacggacaacaatggagtcaagaccatcgccaataaccttaccagcacggtccaggtcttcgcggactcagactatcagctcccgtacgtgctcgggtcggctcacgagggctgcctcccgccgttcccagcggacgttttcatgattcctcagtacgggtatctgacgcttaatgatggaagccaggccgtgggtcgttcgtccttttactgcctggaatatttcccgtcgcaaatgctaagaacgggtaacaacttccagttcagctacgagtttgagaacgtacctttccatagcagctacgctcacagccaaagcctggaccgactaatgaatccactcatcgaccaatacttgtactatctctcaaagactattaacggttctggacagaatcaacaaacgctaaaattcagtgtggccggacccagcaacatggctgtccagggaagaaactacatacctggacccagctaccgacaacaacgtgtctcaaccactgtgactcaaaacaacaacagcgaatttgcttggcctagagcttcttcttgggctctcaatggacgtaatagcttgatgaatcctggacctgctatggccagccacaaagaaggagaggaccgtttctttcctttgtctggatctttaatttttggcaaacaaggaactggaagagacaacgtggatgcggacaaagtcatgataaccaacgaagaagaaattaaaactactaacccggtagcaacggagtcctatggacaagtggccacaaaccaccagagtgcccaagcacaggcgcagaccggctgggttcaaaaccaaggaatacttccgggtatggtttggcaggacagagatgtgtacctgcaaggacccatttgggccaaaattcctcacacggacggcaactttcacccttctccgctgatgggagggtttggaatgaagcacccgcctcctcagatcctcatcaaaaacacacctgtacctgcggatcctccaacggccttcaacaaggacaagctgaactctttcatcacccagtattctactggccaagtcagcgtggagatcgagtgggagctgcagaaggaaaacagcaagcgctggaacccggagatccagtacacttccaactattacaagtctaataatgttgaatttgctgttaatactgaaggtgtatatagtgaaccccgccccattggcaccagatacctgactcgtaatctgtaattgcttgttaatcaataaaccgtttaattcgtttcagttgaactgcggcc

SEQ ID NO: 595 - DNA, 2601 bp, Artificial Sequence
  source: /note="Description of Artificial Sequence: Synthetic polynucleotide"
ccatcgacgtcagacgcggaagcttcgatcaactacgcggacaggtaccaaaacaaatgttctcgtcacgtgggcatgaatctgatgctgtttccctgcagacaatgcgagagactgaatcagaattcaaatatctgcttcactcacggtgtcaaagactgtttagagtgctttcccgtgtcagaatctcaacccgtttctgtcgtcaaaaaggcgtatcagaaactgtgctacattcatcacatcatgggaaaggtgccagacgcttgcactgcttgcgacctggtcaatgtggacttggatgactgtgtttctgaacaataaatgacttaaaccaggtatggctgccgatggttatcttccagattggctcgaggacaaccttagtgaaggaattcgcgagtggtgggctttgaaacctggagcccctcaacccaaggcaaatcaacaacatcaagacaacgctcgaggtcttgtgcttccgggttacaaataccttggacccggcaacggactcgacaagggggagccggtcaacgcagcagacgcggcggccctcgagcacgacaaggcctacgaccagcagctcaaggccggagacaacccgtacctcaagtacaaccacgccgacgccgagttccaggagcggctcaaagaagatacgtcttttgggggcaacctcgggcgagcagtcttccaggccaaaaagaggcttcttgaacctcttggtctggttgaggaagcggctaagacggctcctggaaagaagaggcctgtagagcagtctcctcaggaaccggactcctccgcgggtattggcaaatcgggtgcacagcccgctaaaaagagactcaatttcggtcagactggcgacacagagtcagtcccagaccctcaaccaatcggagaacctcccgcagccccctcaggtgtgggatctcttacaatggcttcaggtggtggcgcaccagtggcagacaataacgaaggtgccgatggagtgggtagttcctcgggaaattggcattgcgattcccaatggctgggggacagagtcatcaccaccagcacccgaacctgggccctgcccacctacaacaatcacctctacaagcaaatctccaacagcacatctggaggatcttcaaatgacaacgcctacttcggctacagcaccccctgggggtattttgacttcaacagattccactgccacttctcaccacgtgactggcagcgactcatcaacaacaactggggattccggcctaagcgactcaacttcaagctcttcaacattcaggtcaaagaggttacggacaacaatggagtcaagaccatcgccaataaccttaccagcacggtccaggtcttcacggactcagactatcagctcccgtacgtgctcgggtcggctcacgagggctgcctcccgccgttcccagcggacgttttcatgattcctcagtacgggtatctgacgcttaatgatggaagccaggccgtgggtcgttcgtccttttactgcctggaatatttcccgtcgcaaatgctaagaacgggtaacaacttccagttcagctacgagtttgagaacgtacctttccatagcagctacgctcacagccaaagcctggaccgactaatgaatccactcatcgaccaatacttgtactatctctcaaagactattaacggttctggacagaatcaacaaacgctaaaattcagtgtggccggacccagcaacatggctgtccagggaagaaactacatacctggacccagctaccgacaacaacgtgtctcaaccactgtgactcaaaacaacaacagcgaaattgcttggcctagagcttcttcttgggctctcaatggacgtaatagcttgatgaatcctggacctgctatggccagccacaaagaaggagaggaccgtttctttcctttgtctggatctttaatttttggcaaacaaggaactggaagagacaacgtggatgcggacaaagtcatgataaccaacgaagaagaaattaaaactactaacccagtagcaacggagtcctatggacaagtggccacaaaccaccagagtgcccaagcacaggcgcagaccggctgggttcaaaaccaaggaatacttccgggtatggtttggcaggacagagatgtgtacctgcaaggacccatttgggccaaaattcctcacacggacggcaactttcacccttctccgctgatgggagggtttggaatgaagcacccgcctcctcagatcctcatcaaaaacacacctgtacctgcggatcctccaacggccttcaacaaggacaagctgaactctttcatcacccagtattctactggccaagtcagcgtggagatcgagtgggagctgcagaaggaaaacagcaagcgctggaacccggagatccagtacacttccaactattgcaagtctaataatgttgaatttgctgttaatactgaaggtgtatatagtgaaccccgccccattggcaccagatacctgactcgtaatctgtaattgcttgttaatcaataaaccgtttaattcgtttcagttgaactgcggcc

SEQ ID NO: 596 - DNA, 2601 bp, Artificial Sequence
  source: /note="Description of Artificial Sequence: Synthetic polynucleotide"
ccatcgacgtcagacgcggaagcttcgatcaactacgcggacaggtaccaaaacaaatgttctcgtcacgtgggcatgaatctgatgctgtttccctgcagacaatgcgagagactgaatcagaattcaaatatctgcttcactcacggtgtcaaagactgtttagagtgctttcccgtgtcagaatctcaacccgtttctgtcgtcaaaaaggcgtatcagaaactgtgctacattcatcacatcatgggaaaggtgccagacgcttgcactgcttgcgacctggtcaatgtggacttggatgtctgtgtttctgaacaataaatgacttaaaccaggtatggctgccgatggttatcttccagattggctcgaggacaaccttagtgaaggaattcgcgagtggtgggctttgaaacctggagcccctcaacccaaggcaaatcaacaacatcaagacaacgctcgaggtcttgtgcttccgggttacaaataccttggacccggcaacggactcgataagggggagccggtcaacgcagcagacgcggcggccctcgagcacgacaaggcctacgaccagcagctcaaggccggagacaacccgtacctcaagtacaaccacgccgacgccgagttccaggagcggctcaaagaagatacgtcttttgggggcaacctcgggcgagcagtcttccaggccaaaaagaggcttcttgaacctcttggtctggttgaggaagcggctaagacggctcctggaaagaagaggcctgtagagcagtctcctcaggaaccggactcctccgcgggtattggcaaatcgggtgcacagcccgctaaaaagagactcaatttcggtcagactggcgacacagagtcagtcccagaccctcaaccaatcggagaacctcccgcagccccctcaggtgtgggatctcttacaatggcttcaggtggtggcgcaccagtggcagacaataacgaaggtgccgatggagtgggtagttcctcgggaaattggcattgcgattcccaatggctgggggacagagtcatcaccaccagcacccgaacctgggccctgcccacctacaacaatcacctctacaagcaaatctccaacagcacatctggaggatcttcaaatgacaacgcctacttcggctacagcaccccctgggggtattttgacttcaacagattccactgccacttctcaccacgtgactggcagcgactcatcaacaacaactggggattccggcctaagcgactcaacttcaagctcttcaacattcaggtcaaagaggttacggacaacaatggagtcaagaccatcgccaataaccttaccagcacggtccaggtcttcacggactcagactatcagctcccgtacgtgctcgggtcggctcacgagggctgcctcccgccgttcccagcggacgttttcatgattcctcagtacgggtatctgacgcttaatgatggaagccaggccgtgggtcgttcgtccttttactgcctggaatatttcccgtcgcaaatgctaagaacgggtaacaacttccagttcagctacgagtttgagaacgtacctttccatagcagctacgctcacagccaaagcctggaccgactaatgaatccactcatcgaccaatacttgtactatctctcaaagactattaacggttctggacagaatcaacaaacgctaaaattcagtgtggccggacccagcaacatggctgtccagggaagaaactacatacctggacccagctaccgacaacaacgtgtctcaaccactgtgactcaaaacaacaacagcgaatttgcttggcctagagcttcttcttgggctctcaatggacgtaatagcttgatgaatcctggacctgctatggccagccacaaagaaggagaggaccgtttctttcctttgtctggatctttaatttttggcaaacaaggaactggaagagacaacgtggatgcggacaaagtcatgataaccaacgaagaagaaattaaaactactaacccggtagcaacggagtcctatggacaagtggccacaaaccaccagagtgcccaagcacaggcgcagaccggctgggttcaaaaccaaggaatacttccgggtatggtttggcaggacagagatgtgtacctgcaaggacccatttgggccaaaattcctcacacggacggcaactttcacccttctccgctgatgggagggtttggaatgaagcacccgcctcctcagatcctcatcaaaaacacacctgtacctgcggatcctccaacggccttcaacaaggacaagctgaactctttcatcacccagtattctactggccaagtcagcgtggagatcgagtgggagctgcagaaggaaaacagcaagcgctggaacccggagatccagtacacttccaactattacaagtctaataatgttgaatttgctgttaatactgaaggtgtatatagtgaaccccgccccattggcaccagatacctgactcgtaatctgtaattgcttgttaatcaataaaccgtttaattcgtttcagttgaactgcggcc

SEQ ID NO: 597 - protein, 736 aa, Artificial Sequence
  source: /note="Description of Artificial Sequence: Synthetic polypeptide"
MTADGYLPDWLEDNLSEGIREWWALKPGAPQPKANQQHQDNARGLVLPGYKYLGPGNGLDKGEPVNAADAAALEHDKAYDQQLKAGDNPYLKYNHADAEFQERLKEDTSFGGNLGRAVFQAKKRLLEPLGLVEEAAKTAPGKKRPVEQSPQEPDSSAGIGKSGAQPAKKRLNFGQTGDTESVPDPQPIGEPPAAPSGVGSLTMASGGGAPVADNNEGADGVGSSSGNWHCDSQWLGDRVITTSTRTWALPTYNNHLYKQISNSTSGGSSNDNAYFGYSTPWGYFDFNRFHCHFSPRDWQRLINNNWGFRPKQLNFKLFNIQVKEVTDNNGVKTIANNLTSTVQVFTDSDYQLPYVLGSAHEGCLPPFPADVFMIPQYGYLTLNDGSQAVGRSSFYCLEYFPSQMLRTGNNFQFSYEFENVPFHSSYAHSQSLDRLMNPLIDQYLYYLSKTINGSGQNQQTLKFSVAGPSNMAVQGRNYIPGPSYRQQRVSTTVTQNNNSEFAWPGASSWALNGRNSLMNPGPAMASHKEGEDRFFPLSGSLIFGKQGTGRDNVDADKVMITNEEEIKTTNPVATESYGQVATNHQSAQAQAQTGWVQNQGILPGMVWQDRDVYLQGPIWAKIPHTDGNFHPSPLMGGFGMKHPPPQILIKNTPVPADPPTAFNKDKLNSFITQYSTGQVSVEIEWELQKENSKRWNPEIQYTSNYYKSNNVEFAVNTEGVYSEPRPIGTRYLTRNL

SEQ ID NO: 598 - protein, 736 aa, Artificial Sequence
  source: /note="Description of Artificial Sequence: Synthetic polypeptide"
MAADGYLPDWLEDNLSEGIREWWALKPGAPQPKANQQHQDNARGLVLPGYKYLGPGNGLDKGEPVNAADAAALEHDKAYDQQLKAGDNPYLKYNHADAEFQERLKEDTSFGGNLGRAVFQAKKRLLEPLGLVEEAAKTAPGKKRPVEQSPQEPDSSAGIGKSGAQPAKKRLNFGQTGDTESVPDPQPIGEPPAAPSGVGSLTMASGGGAPVADNNEGADGVGSSSGNWHCDSQWLGDRVITTSTRTWALPTYNNHLYKQISNSTSGGSSNDNAYFGYSTPWGYFDFNRFHCHFSPRDWQRLINNNWGFRPKRLNFKLFNIQVKEVTDNNGVKTIANNLTSTVQVFTDSDYQLPYVLGSAHEGCLPPFPADVFMIPQYGYLTLNDGSQAVGRSSFYCLEYFPSQMLRTGNNFQFSYEFENVPFHSSYAHSQSLDRLMNPLIDQYLYYLSKTINGSGQNQQTLKFSVAGPSNMAVQGRNYIPGPSYRQQRVSTTVTQNNNSEFAWPGASSWALNGRNSLMNPGPAMASHKEGEDRFFPLSGSLIFGKQGTGRDNVDADKVMITNEEEIKTTNPVATESYGQVATNHQSAQAQAQTGWVQNQGILPGMVWQDRDVYLQGPIWAKIPHTGGNFHPSPLMGGFGMKHPPPQILIKNTPVPADPPTAFNKDKLNSFITQYSTGQVSVEIEWELQKENSKRWNPEIQYTSNYYKSNNVEFAVNTGGVYSEPRPIGTRYLTRNL

SEQ ID NO: 599 - protein, 736 aa, Artificial Sequence
  source: /note="Description of Artificial Sequence: Synthetic polypeptide"
MAADGYLPDWLEDNLSEGIREWWALKPGAPQPKANQQHQDNARGLVLPGYKYLGPGNGLDKGEPVNAADAAALEHDKAYDQQLKAGDNPYLKYNHADAEFQERLKEDTSFGGNLGRAVFQAKKRLLEPLGLVEEAAKTAPGKKRPVEQSPQEPDSSAGIDKSGAQPAKKRLNFGQTGDTESVPDPQPIGEPPAAPSGVGSLTMASGGGAPVADNNEGADGVGSSSGNWHCDSQWLGDRVITTSTRTWALPTYNNHLYKQISNSTSGGSSNDNAYFGYSTPWGYFDFNRFHCHFSPRDWQRLINNNWGFRPKRLNFKLFNIQVKEVTDNNGVKTIANNLTSTVQVFTDSDYQLPYVLGSAHEGCLPPFPADVFMIPQYGYLTLNDGSQAVGRSSFYCLEYFPSQMLRTGNNFQFSYEFENVPFHSSYAHSQSLDRLMNPLIDQYLYYLSKTINGSGQNQQTLKFSVAGPSNMAVQGRNYIPGPSYRQQRVSTTVTQNNNSEFAWPGASSWALNGRNSLMNPGPAMASHKEGEDRFFPLSGSLIFGKQGTGRDNVDADKVMITNEEEIKTTNPVATESYGQVATNHQSAQAQAQTGWVQNQGILPGMVWQDRDVYLQGPIWAKIPHTDGNFHPSPLMGGFGMKHPPPQILIKNTPVPADPPTAFNKDKLNSFITQYSTGQVSVEIEWELQKENSKRWNPEIQYTSNYYKSNNVEFAVNTEGVYSEPRPIGTRYLTRNL

SEQ ID NO: 600 - protein, 736 aa, Artificial Sequence
  source: /note="Description of Artificial Sequence: Synthetic polypeptide"
MAADGYLPDWLEDNLSEGIREWWALKPGAPQPKANQQHQDNARGLVLPGYKYLGPGNGLDKGEPVNAADAAALEHDKAYDQQLKAGDNPYLKYNHADAEFQERLKEDTSFGGNLGRAVLQAKKRLLEPLGLVEEAAKTAPGKKRPVEQSPQEPDSSAGIGKSGAQPAKKRLNFGQTGDTESVPDPQPIGEPPAAPSGVGSLTMASGGGAPVADNNEGADGVGSSSGNWHCDSQWLGDRVITTSTRTWALPTYNNHLYKQISNSTSGGSSNDNAYFGYSTPWGYFDFNRFHCHFSPRDWQRLINNNWGFRPKRLNFKLFNIQVKEVTDNNGVKTIANNLTSTVQVFTDSDYQLPYVLGSAHEGCLPPFPADVFMIPQYGYLTLNDGSQAVGRSSFYCLEYFPSQMLRTGNNFQFSYEFENVPFHSSYAHSQSLDRLMNPLIDQYLYYLSKTINGSGQNQQTLKFSVAGSSNMAVQGRNYIPGPSYRQQRVSTTVTQNNNSEFAWPGASSWALNGRNSLMNPGPAMASHKEGEDRFFPLSGSLIFGKQGTGRDNVDADKVMITNEEEIKTTNPVATESYGQVATNHQSAQAQAQTGWVQNQGILPGMVWQDRDVYLQGPIWAKIPHTDGNFHPSPLMGGFGMKHPPPQILIKNTPVPADPPTAFNKDKLNSFITQYSTGQVSVEIEWELQKENSKRWNPEIQYTSNYYKSNNVEFAVNTEGVYSEPRPIGTRYLTRNL

SEQ ID NO: 601 - protein, 736 aa, Artificial Sequence
  source: /note="Description of Artificial Sequence: Synthetic polypeptide"
MAADGYLPDWLEDNLSEGIREWWALKPGAPQPKANQQHQDNARGLVLPGYKYLGPGNGLDKGEPVNAADAAALEHDRAYDQQLKAGDNPYLKYNHADAEFQERLKEDTSFGGNLGRAVFQAKKRLLEPLGLVEEAAKTAPGKKRPVEQSPQEPDSSAGIGKSGAQPAKKRLNFGQTGDTESVPDPQPIGEPPAAPSGVGSLTMASGGGAPVADNNEGADGVGSSSGNWHCDSQWLGDRVITTSTRTWALPTYNNHLYKQISNSTSGGSSNDNAYFGYSTPWGYFDFNRFHCHFSPRDWQRLINNNWGFRPKRLNFKLFNIQVKEVTDNNGVKTIANNLTSTVQVFTDSDYQLPYVLGSAHEGCLPPFPADVFMIPQYGYLTLNDGSQAVGRSSFYCLEYFPSQMLRTGNNFQFSYEFENVPFHSSYAHSQSLDRLMNPLIDQYLYYLSKTINGSGQNQQTLKFSVAGPSNMAVQGRNYIPGPSYRQQRVSTTVTQNNNSEFAWPGASSWALNGRNSLMNPGPAMASHKEGEDRFFPLSGSLIFGKQGTGRDNVDADKVMITNEEEIKTTNPVATESYGQVATNHQSAQAQAQTGWVQNQGILPGMVWQDRDVYLQGPIWAKIPHTDGNFHPSPLMGGFGMKHPPPQILIKNTPVPADPPTAFNKDKLNSFITQYSTGQVSVEIEWELQKKNSKRWNPEIQYTSNYYKSNNVEFAVNTEGVYSEPRPIGTRYLTRNL

SEQ ID NO: 602 - protein, 736 aa, Artificial Sequence
  source: /note="Description of Artificial Sequence: Synthetic polypeptide"
MAADGYLPDWLEDNLSEGIREWWALKPGAPQPKANQQHQDNARGLVLPGYKYLGPGNGLDKGEPVNAADAAALEHDKAYDQQLKAGDNPYLKYNHADAEFQERLKEDTSFGGNLGRAVFQAKKRLLEPLGLVEEAAKTAPGKKRPVEQSPQEPDSSAGIGKSGAQPAKKRLNFGQTGDTESVPDPQPIGEPPAAPSGVGSLTMASGGGAPVADNNEGADGVGSSSGNWHCDSQWLGDRVITTSTRTWALPTYNNHLYKQISNSTSGGSSNDNAYFGYSTPWGYFDFNRFHCHFSPRDWQRLINNNWGFRPKRLNFKLFNIQVKEVTDNNGVKTIANNLTSTVQVFTDSDYQLPYVLGSAHEGCLPPFPADVFMIPQYGYLTLNDGSQAVGRSSFYCLEYFPSQMLRTGNNFQFSYEFENVPFHSSYAHSQSLDRLMNPLIDQYLYYLSKTINGSGQNQQTLKFSVAGPSNMAVQGRNYIPGPSYRQQRVSTTVTQNNNSEFAWPGASSWALNGRNSLMNPGPAMASHKEGEDRFFPLSGSLIFGKQGTGRDNVDADKVMITNEEEIKTTNPVATESYGQVATNHQSAQARAQTGWVQNQGILPGMVWQDRDVYLQGPIWAKIPHTDGNFHPSPLMGGFGMKHPPPQILIKNTPVPADPPTAFNKDKLNSFITQYSTGQVSVEIEWELQKENSKRWNPEIQYTSNYYKSNNVEFAVNTEGVYSEPRPIGTRYLTRNL

SEQ ID NO: 603 - protein, 736 aa, Artificial Sequence
  source: /note="Description of Artificial Sequence: Synthetic polypeptide"
MAADGYLPDWLEDNLSEGIREWWALKPGAPQPKANQQHQDNARGLVLPGYKYLGPGNGLDKGEPVNAVDAAALEHDKAYDQQLKAGDNPYLKYNHADAEFQERLKEDTSFGGNLGRAVFQAKKRLLEPLGLVEEAAKTAPGKKRPVEQSPQEPDSSAGIGKSGAQPAKKRLNFGQTGDTESVPDPQPIGEPPAAPSGVGSLTMASGGGAPVADNNEGADGVGSSSGNWHCDSQWLGDRVITTSTRTWALPTYNNHLYKQISNSTSGGSSNDNAYFGYSTPWGYFDFNRFHCHFSPRDWQRLINNNWGFRPKRLNFKLFNIQVKEVTDNNGVKTIANNLTSTVQVFTDSDYQLPYVLGSAHEGCLPPFPADVFMIPQYGYLTLNDGSQAVGRSSFYCLEYFPSQMLRTGNNFQFSYEFENVPFHSSYAHSQSLDRLMNPLIDQYLYYLSKTINGSGQNQQTLKFSVAGPSNMAVQGRNYIPGPSYRQQRVSTTVTQNNNSEFAWPGASSWALNGRNSLMNPGPAMASHKEGEDRFFPLSGSLIFGKQGTGRDNVDADKVMITNEEEIKTTNPVATESYGQVATNHQSAQAQAQTGWVQNQGILPGMVWQDRDVYLQGPIWAKIPHTDGNFHPSPLMGGFGMKHPPPQILIKNTPVPADPPTAFNKDKLNSFITQYSTGQVSVEIEWELQKENSKRWNPEIQYTSNYYKSNNVEFAVNTEGVYSEPRPIGTRYLTRNL

SEQ ID NO: 604 - protein, 736 aa, Artificial Sequence
  source: /note="Description of Artificial Sequence: Synthetic polypeptide"
MAADGYLPDWLEDNLSEGIREWWALKPGAPQPKANQQHQDNARGLVLPGYKYLGPGNGLDKGEPVNAADAAALEHDKAYDQQLKAGDNPYLKYNHADAEFQERLKEDTSFGGNLGRAVFQAKKRLLEPLGLVEEAAKTAPGKKRPVEQSPREPDSSAGIGKSGAQPAKKRLNFGQTGDTESVPDPQPIGEPPAAPSGVGSLTMASGGGAPVADNNEGADGVGSSSGNWHCDSQWLGDRVITTSTRTWALPTYNNHLYKQISNSTSGGSSNDNAYFGYSTPWGYFDFNRFHCHFSPRDWQRLINNNWGFRPKRLNFKLFNIQVKEVTDNNGVKTIANNLTSTVQVFTDSDYQLPYVLGSAHEGCLPPFPADVFMIPQYGYLTLNDGSQAVGRSSFYCLEYFPSQMLRTGNNFQFSYEFENVPFHSSYAHSQSLDRLMNPLIDQYLYYLSKTINGSGQNQQTLKFSVAGPSNMAVQGRNYIPGPSYRQQRVSTTVTQNNNSEFAWPGASSWALNGRNSLMNPGPAMASHKEGEDRFFPLSGSLIFGKQGTGRDNVDADKVMITNEEEIKTTNPVATESYGQVATNHQSAQAQAQTGWVQNQGILPGMVWQDRDVYLQGPIWAKIPHTDGNFHPSPLMGGFGMKHPPPQILIKNTPVPADPPTAFNKDKLNSFITQYSTGQVSVEIEWELQKENSKRWNPEIQYTSNYYKSNNVEFAVNTEGVYSEPRPIGTRYLTRNL

SEQ ID NO: 605 - protein, 736 aa, Artificial Sequence
  source: /note="Description of Artificial Sequence: Synthetic polypeptide"
MAADGYLPDWLEDNLSEGIREWWALKPGAPQPKANQQHQDNARGLVLPGYKYLGPGNGLDKGEPVNAADAAALEHDKAYDQQLKAGDNPYLKYNHADAEFQERLKEDTSFGGNLGRAVFQAKKRLLEPLGLVEEAAKTAPGKKRPVEQSPQEPDSSAGIGKSGAQPAKKRLNFGQTGDTESVPDPQPIGEPPAAPSGVGSLTMASCGGAPVADNNEGADGVGSSSGNWHCDSQWLGDRVITTSTRTWALPTYNNHLYKQISNSTSGGSSNDNAYFGYSTPWGYFDFNRFHCHFSPRDWQRLINNNWGFRPKRLNFKLFNIQVKEVTDNNGVKTIANNLTSTVQVFTDSDYQLPYVLGSAHEGCLPPFPADVFMIPQYGYLTLNDGSQAVGRSSFYCLEYFPSQMLRTGNNFQFSYEFENVPFHSSYAHSQSLDRLMNPLIDQYLYYLSKTINGSGQNQQTLKFSVAGPSNMAVQGRNYIPGPSYRQQRVSTTVTQNNNSEFAWPGASSWALNGRNSLMNPGPAMASHKEGEDRFFPLSGSLIFGKQGTGRDNVDADKVMITNEEEIKTTNPVATESYGQVATNHQSAQAQAQTGWVQNQGILPGMVWQDRDVYLQGPIWAKIPHTDGNFHPSPLMGGFGMKHPPPQILIKNTPVPADPPTAFNKDKLNSFITQYSTGQVSVEIEWELQKENSKRWNPEIQYTSNYYKSNNVEFAVNTEGVYSEPRPIGTRYLTRNL

SEQ ID NO: 606 - protein, 736 aa, Artificial Sequence
  source: /note="Description of Artificial Sequence: Synthetic polypeptide"
MAADGYLPDWLEDNLSEGIREWWALKPGAPQPKANQQHQDNARGLVLPGYKYLGPGNGLDKGEPINAADAAALEHDKAYDQQLKAGDNPYLKYNHADAEFQERLKEDTSFGGNLGRAVFQAKKRLLEPLGLVEEAAKTAPGKKRPVEQSPQEPDSSAGIGKSGAQPAKKRLNFGQTGDTESVPDPQPIGEPPAAPSGVGSLTMASGGGAPVADNNEGADGVGSSSGNWHCDSQWLGDRVITTSTRTWALPTYNNHLYKQISNSTSGGSSNDNAYFGYSTPWGYFDFNRFHCHFSPRDWQRLINNNWGFRPKRLNFKLFNIQVKEVTDNNGVKTIANNLTSTVQVFTDSDYQLPYVLGSAHEGCLPPFPADVFMIPQYGYLTLNDGSQAVGRSSFYCLEYFPSQMLRTGNNFQFSYEFENVPFHSSYAHSQSLDRLMNPLIDQYLYYLSKTINGSGQNQQTLKFSVAGPSNMAVQGRNYIPGPSYRQQRVSTTVTQNNNSEFAWPGASSWALNGRNSLMNPGPAMASHKEGEDRFFPLSGSLIFGKQGTGRDNVDADKVMITNEEEIKTTNPVATESYGQVATNHQSAQAQAQTGWVQNQGILPGMVWQDRDVYLQGPIWAKIPHTYGNFHPSPLMGGFGMKHPPPQILIKNTPVPADPPTAFNKDKLNSFITQYSTGQVSVEIEWELQKENSKRWNPEIQYTSNYYKSNNVEFAVNTEGVYSEPRPIGTRYLTRNL

SEQ ID NO: 607 - protein, 736 aa, Artificial Sequence
  source: /note="Description of Artificial Sequence: Synthetic polypeptide"
MAADGYLPDWLEDNLSEGIREWWALKPGAPQPKANQQHQDNARGLVLPGYKYLGPGNGLDKGEPVNAADAAALEHDKAYDQQLKAGDNPYLKYNHADAEFQERLKEDTSFGGNLGRAVFQAKKRLLEPLGLVEEAAKTAPGKKRPVEQSPQEPDSSAGIGKSGAQPAKKRLNFGQTGDTESVPDPQPIGEPPAAPSGVGSLTMASGGGAPVADNNEGADGVGSSSGNWHCDSQWLGDRVITTSTRTWALPTYNNHLYKQISNSTSGGSSNDNAYFGYSTPWGYFDFNRFHCHFSPHDWQRLINNNWGFRPKRLNFKLFNIQVKEVTDNNGVKTIANNLTSTVQVFTDSDYQLPYVLGSAHEGCLPPFPADVFMIPQYGYLTLNDGSQAVGRSSFYCLEYFPSQMLRTGNNFQFSYEFENVPFHSSYAHSQSLDRLMNPLIDQYLYYLSKTINGSGQNQQTLKFNVAGPSNMAVQGRNYIPGPSYRQQRVSTTVTQNNNSEFAWPRASSWALNGRNSLMNPGPAMASHKEGEDRFFPLSGSLIFGKQGTGRDNVDADKVMITNEEEIKTTNPVATESYGQVATNHQSAQAQAQTGWVQNQGILPGMVWQDRDVYLQGPIWAKIPHTDGNFHPSPLMGGFGMKHPPPQILIKNTPVPADPPTAFNKDKLNSFITQYSTGQVSMEIEWELQKENSKRWNPEIQYTSNYYKSNNVEFAVNTEGVYSEPRPIGTRYLTRNL

SEQ ID NO: 608 - protein, 736 aa, Artificial Sequence
  source: /note="Description of Artificial Sequence: Synthetic polypeptide"
MAADGYLPDWLEDNLSEGIREWWALKPGAPQPKANQQHQDNARGLVLPGYKYLGPGNGLDKGEPVNAADAAALEHDKAYDQQLKAGDNPYLKYNHADAEFQERLKEDTSFGGNLGRAVFQAKKRLLEPLGLVEEAAKTAPGKKRPVEQSPQEPDSSAGIGKSGAQPAKKRLNFGQTGDTESVPDPQPIGEPPAAPSGVGSLTMASGGGAPVADNNEGADGVGSSSGNWHCDSQWLGDRVITTSTRTWALPTYNNHLYKQISNSTSGGSSNDNAYFGYSTPWGYFDFNRFHCHFSPRDWQRLINNNWGFRPKRLNFKLFNIQVKEVTDNNGVKTIANNLTSTVQVFTDSDYQLPYVLGSAHEGCLPPFPADVFMIPQYGYLTLNDGSQAVGRSSFYCLEYFPSQMLRTGNNFQFSYEFENVPFHSSYAHSQSLDRLMNPLIDQYLYYLSKTINGSGQNQQTLKFSVAGPSNMAVQGRNYIPGPSYRQQRVSTTVTQNNNSEFAWPRASSWALNGRNSLMNPGPAMASHKEGEDRFFPLSGSLIFGKQGTGRDNVDADKVMITNEEEIKTTNPVATESYGQVATNHQSAQAQAQTGWVQNQGILPGMVWQDRDVYLQGPIWAKIPHTDGNFHPSPLMGGFGMKHPPPQILIKNTPVPADPPTAFNKDKLNSFITQYSTGQVSVEIEWELQKENSKRWNPEIQYTSNYYKSNNVEFAVNTEGVYSEPRPIGTRYLTRNL

SEQ ID NO: 609 - protein, 736 aa, Artificial Sequence
  source: /note="Description of Artificial Sequence: Synthetic polypeptide"
MAADGYLPDWLEDNLSEGIREWWALKPGAPQPKANQQHQDNARGLVLPGYKYLGPGNGLDKGEPVNAADAAALEHDKAYDQQLKAGDNPYLKYNHADAEFQERLKEDTSFGGNLGRAVFQAKKRLLEPLGLVEEAAKTAPGKKRPVEQSPQEPDSSAGIGKSGAQPAKKRLNFGQTGDTESVPDPQPIGEPPAAPSGVGSLTMASGGGAPVADNNEGADGVGSSSGNWHCDSQWLGDRVITTSTRTWALPTYNNHLYKQISNSTSGGSSNDNAYFGYSTPWGYFDFNRFHCHFSPRDWQRLINNNWGFRPKRLNFKLFNIQVKEVTDNNGVKTIANNLTSTVQVFTDSDYQLPYVLGSAHEGCLPPFPADVFMIPQYGYLTLNDGSQAVGRSSFYCLEYFPSQMLRTGNNFQFSYEFENVPFHSSYAHSQSLDRLMNPLIDQYLYYLSKTINGSGQNQQTLKFSVAGPSNMAVQGRNYIPGPSYRQQRVSTTVTQNNNSEFAWPRASSWALNGRNSLMNPGPAMASHKEGEDRFFPLSGSLIFGKQGTGRDNVDADKVMITNEEEIKTTNPVATESYGQVATNHQSAQAQAQTGWVQNQGILPGMVWQDRDVYLQGPIWAKIPHTDGNFHPSPLMGGFGMKHPPPQILIKNTPVPADPPTAFNKDKLNSFITQYSTGQVSVEIEWERQKENSKRWNPEIQYTSNYYKSNNVEFAVNTEGVYSEPRPIGTRYLTRNL

SEQ ID NO: 610 - protein, 736 aa, Artificial Sequence
  source: /note="Description of Artificial Sequence: Synthetic polypeptide"
MAADGYLPDWLEDNLSEGIREWWALKPGAPQPKANQQHQDNARGLVLPGYKYLGPGNGLDKGEPVNAADAAALEHDKAYDQQLKAGDNPYLKYNHADAEFQERLKEDTSFGGNLGRAVFQAKKRLLEPLGLVEEAAKTAPGKKRPVEQSPQEPDSSAGIGKSGAQPAKKRLNFGQTGDTESVPDPQPIGEPPAAPSGVGSLTMASGGGAPVADNNEGADGVGSSSGNWHCDSQWLGDRVITTSTRTWALPTYNNHLYKQISNSTSGGSSNDNAYFGYSTPWGYFDFNRFHCHFSPRDWQRLINNNWGFRPKRLNFKLFNIQVKEVTDNNGVKTIANNLTSTVQVFADSDYQLPYVLGSAHEGCLPPFPADVFMIPQYGYLTLNDGSQAVGRSSFYCLEYFPSQMLRTGNNFQFSYEFENVPFHSSYAHSQSLDRLMNPLIDQYLYYLSKTINGSGQNQQTLKFSVAGPSNMAVQGRNYIPGPSYRQQRVSTTVTQNNNSEFAWPRASSWALNGRNSLMNPGPAMASHKEGEDRFFPLSGSLIFGKQGTGRDNVDADKVMITNEEEIKTTNPVATESYGQVATNHQSAQAQAQTGWVQNQGILPGMVWQDRDVYLQGPIWAKIPHTDGNFHPSPLMGGFGMKHPPPQILIKNTPVPADPPTAFNKDKLNSFITQYSTGQVSVEIEWELQKENSKRWNPEIQYTSNYYKSNNVEFAVNTEGVYSEPRPIGTRYLTRNL

SEQ ID NO: 611 - protein, 736 aa, Artificial Sequence
  source: /note="Description of Artificial Sequence: Synthetic polypeptide"
MAADGYLPDWLEDNLSEGIREWWALKPGAPQPKANQQHQDNARGLVLPGYKYLGPGNGLDKGEPVNAADAAALEHDKAYDQQLKAGDNPYLKYNHADAEFQERLKEDTSFGGNLGRAVFQAKKRLLEPLGLVEEAAKTAPGKKRPVEQSPQEPDSSAGIGKSGAQPAKKRLNFGQTGDTESVPDPQPIGEPPAAPSGVGSLTMASGGGAPVADNNEGADGVGSSSGNWHCDSQWLGDRVITTSTRTWALPTYNNHLYKQISNSTSGGSSNDNAYFGYSTPWGYFDFNRFHCHFSPRDWQRLINNNWGFRPKRLNFKLFNIQVKEVTDNNGVKTIANNLTSTVQVFTDSDYQLPYVLGSAHEGCLPPFPADVFMIPQYGYLTLNDGSQAVGRSSFYCLEYFPSQMLRTGNNFQFSYEFENVPFHSSYAHSQSLDRLMNPLIDQYLYYLSKTINGSGQNQQTLKFSVAGPSNMAVQGRNYIPGPSYRQQRVSTTVTQNNNSEIAWPRASSWALNGRNSLMNPGPAMASHKEGEDRFFPLSGSLIFGKQGTGRDNVDADKVMITNEEEIKTTNPVATESYGQVATNHQSAQAQAQTGWVQNQGILPGMVWQDRDVYLQGPIWAKIPHTDGNFHPSPLMGGFGMKHPPPQILIKNTPVPADPPTAFNKDKLNSFITQYSTGQVSVEIEWELQKENSKRWNPEIQYTSNYCKSNNVEFAVNTEGVYSEPRPIGTRYLTRNL

SEQ ID NO: 612 - protein, 736 aa, Artificial Sequence; identical to SEQ ID NO: 608
  source: /note="Description of Artificial Sequence: Synthetic polypeptide"

SEQ ID NO: 613 - DNA, 2208 bp, Artificial Sequence
  source: /note="Description of Artificial Sequence: Synthetic polynucleotide"
atggctgccgatggttatcttccagattggctcgaggacaaccttagtgaaggaattcgcgagtggtgggctttgaaacctggagcccctcaacccaaggcaaatcaacaacatcaagacaacgctcgaggtcttgtgcttccgggttacaaataccttggacccggcaacggactcgacaagggggagccggtcaacgcagcagacgcggcggccctcgagcacgacaaggcctacgaccagcagctcaaggccggagacaacccgtacctcaagtacaaccacgccgacgccgagttccaggagcggctcaaagaagatacgtcttttgggggcaacctcgggcgagcagtcttccaggccaaaaagaggcttcttgaacctcttggtctggttgaggaagcggctaagacggctcctggaaagaagaggcctgtagagcagtctcctcaggaaccggactcctccgcgggtattggcaaatcgggtgcacagcccgctaaaaagagactcaatttcggtcagactggcgacacagagtcagtcccagaccctcaaccaatcggagaacctcccgcagccccctcaggtgtgggatctcttacaatggcttcaggtggtggcgcaccagtggcagacaataacgaaggtgccgatggagtgggtagttcctcgggaaattggcattgcgattcccaatggctgggggacagagtcatcaccaccagcacccgaacctgggccctgcccacctacaacaatcacctctacaagcaaatctccaacagcacatctggaggatcttcaaatgacaacgcctacttcggctacagcaccccctgggggtattttgacttcaacagattccactgccacttctcaccacgtgactggcagcgactcatcaacaacaactggggattccggcctaagcgactcaacttcaagctcttcaacattcaggtcaaagaggttacggacaacaatggagtcaagaccatcgccaataaccttaccagcacggtccaggtcttcacggactcagactatcagctcccgtacgtgctcgggtcggctcacgagggctgcctcccgccgttcccagcggacgttttcatgattcctcagtacgggtatctgacgcttaatgatggaagccaggccgtgggtcgttcgtccttttactgcctggaatatttcccgtcgcaaatgctaagaacgggtaacaacttccagttcggctacgagtttgagaacgtacctttccatagcagctacgctcacagccaaagcctggaccgactaatgaatccactcatcgaccaatacttgtactatctctcaaagactattaacggttctggacagaatcaacaaacgctaaaattcagtgtggccggacccagcaacatggctgtccagggaagaaactacatacctggacccagctaccgacaacaacgtgtctcaaccactgtgactcaaaacaacaacagcgaatttgcttggcctggagcttcttcttgggctctcaatggacgtaatagcttgatgaatcctggacctgctatggccagccacaaagaaggagaggaccgtttctttcctttgtctggatctttaatttttggcaaacaaggaactggaagagacaacgtggatgcggacaaagtcatgataaccaacgaagaagaaattaaaactactaacccggtagcaacggagtcctatggacaagtggccacaaaccaccagagtgcccaagcacaggcgcagaccggctgggttcaaaaccaaggaatacttccgggtatggtttggcaggacagagatgtgtacctgcaaggacccatttgggccaaaattcctcacacggacggcaactttcacccttctccgctgatgggagggtttggaatgaagcacccgcctcctcagatcctcatcaaaaacacacctgtacctgcggatcctccaacggccttcaacaaggacaagctgaactctttcatcacccagtattctactggccaagtcagcgtggagatcgagtgggagctgcagaaggaaaacagcaagcgctgggacccggagatccagtacacttccaactattacaagtctaataatgttgaatttgctgttaatactgaaggtgtatatagtgaaccccgccccattggcaccagatacctgactcgtaatctg

SEQ ID NO: 614 - DNA, 2208 bp, Artificial Sequence
  source: /note="Description of Artificial Sequence: Synthetic polynucleotide"
atggctgccgatggttatcttccagattggctcgaggacaaccttagtgaaggaattcgcgagtggtgggctttgaaacctggagcccctcaacccaaggcaaatcaacaacatcaagacaacgctcgaggtcttgtgcttccgggttacaaataccttggacccggcaacggactcgacaagggggagccggtcaacgcagcagacgcggcggccctcgagcacgacaaggcctacgaccagcagctcaaggccggagacaacccgtacctcaagtacaaccacgccgacgccgagttccaggagcggctcaaagaagatacgtcttttgggggcaacctcgggcgagcagtcttccaggccaaaaagaggcttcttgaacctcttggtctggttgaggaagcggctaagacggctcctggaaagaagaggcctgtagagcagtctcctcaggaaccggactcctccgcgggtattggcaaatcgggtgcacagcccgctaaaaagagactcaatttcggtcagactggcgacacagagtcagtcccagaccctcaaccaatcggagaacctcccgcagccccctcaggtgtgggatctcttacaatggcttcaggtggtggcgcaccagtggcagacaataacgaaggtgccgatggagtgggtagttcctcgggaaattggcattgcgattcccaatggctgggggacagagtcatcaccaccagcacccgaacctgggccctgcccacctacaacaatcacctctacaagcaaatctccaacagcacatctggaggatcttcaaatgacaacgcctacttcggctacagcaccccctgggggtattttgacttcaacagattccactgccgcttctcaccacgtgactggcagcgactcatcaacaacaactggggattccggcctaagcgactcaacttcaagctcttcaacattcaggtcaaagaggttacggacaacaatggagtcaagaccatcgccaataaccttaccagcacggtccaggtcttcacggactcagactatcagctcccgtacgtgctcgggtcggctcacgagggctgcctcccgccgttcccagcggacgttttcatgattcctcagtacgggtatctgacgcttaatgatggaagccaggccgtgggtcgttcgtccttttactgcctggaatatttcccgtcgcaaatgctaagaacgggtaacaacttccagttcagctacgagtttgagaacgtacctttccatagcagctacgctcacagccaaagcctggaccgactaatgaatccactcatcgaccaatacttgtactatctctcaaagactattaacggttctggacagaatcaacaaacgctaaaattcagtgtggccggacccagcaacatggctgtccagggaagaaactacatacctggacccagctaccgacaacaacgtgtctcaaccactgtgactcaaaacaacaacagcgaatttgcttggcctggagcttcttcttgggctctcaatggacgtaatagcttgatgaatcctggacctgctatggccagccacaaagaaggagaggaccgtttctttcctttgtctggatctttaatttttggcaaacaaggaactggaagagacaacgtggatgcggacaaagtcatgataaccaacgaagaagaaattaaaactactaacccggtagcaacggagtcctatggacaagtggccacaaaccaccagagtgcccaagcacaggcgcagaccggctgggttcaaaaccaaggaatacttccgggtatggtttggcaggacagagatgtgtacctgcaaggacccatttgggccaaaattcctcacacggacggcaactttcacccttctccgctgatgggagggtttggaatgaagcacccgcctcctcagatcctcatcaaaaacgcccctgtacctgcggatcctccaacggccttcaacaaggacaagctgaactctttcatcacccagtattctactggccaagtcagcgtggagatcgagtgggagctgcagaaggaaaacagcaagcgctggaacccggagatccagtacacttccaactattacaagtctaataatgttgaatttgctgttaatactgaaggtgtatatagtgaaccccgccccattggcaccagatacctgactcgtaatctg

SEQ ID NO: 615 - DNA, 2208 bp, Artificial Sequence
  source: /note="Description of Artificial Sequence: Synthetic polynucleotide"
atggctgccgatggttatcttccagattggctcgaggacaaccttagtgaaggaattcgcgagtggtgggctttgaaacctggagcccctcaacccaaggcaaatcaacaacatcaagacaacgctcgaggtcttgtgcttccgggttacaaataccttggacccggcaacggactcgacaagggggagccggtcagcgcagcagacgcggcggccctcgagcacgacaaggcctacgaccagcagctcaaggccggagacaacccgtacctcaagtacaaccacgccgacgccgagttccaggagcggctcaaagaagatacgtcttttgggggcaacctcgggcgagcagtcttccaggccaaaaagaggcttcttgaacctcttggtctggttgaggaagcggctaagacggctcctggaaagaagaggcctgtagagcagtctcctcaggaaccggactcctccgcgggtattggcaaatcgggtgcacagcccgctaaaaagagactcaatttcggtcagactggcgacacagagtcagtcccagaccctcaaccaatcggagaacctcccgcagccccctcaggtgtgggatctcttacaatggcttcaggtggtggcgcaccagtggcagacaataacgaaggtgccgatggagtgggtagttcctcgggaaattggcattgcgattcccaatggctgggggacagagtcatcaccaccagcacccgaacctgggccctgcccacctacaacaatcacctctacaagcaaatctccaacagcacatctggaggatcttcaaatgacaacgcctacttcggctacagcaccccctgggggtattttgacttcaacagattccactgccacttctcaccgcgtgactggcagcgactcatcaacaacaactggggattccggcctaagcgactcaacttcaagctcttcaacattcaggtcaaagaggttacggacaacaatggagtcaagaccatcgccaataaccttaccagcacggtccaggtcttcacggactcagactatcagctcccgtacgtgctcgggtcggctcacgagggctgcctcccgccgttcccagcggacgttttcatgattcctcagtacgggtatctgacgcttaatgatggaagccaggccgtgggtcgttcgtccttttactgcctggaatatttcccgtcgcaaatgctaagaacgggtaacaacttccagttcagctacgagtttgagaacgtacctttccatagcagctacgctcacagccaaagcctggaccgactaatgaatccactcatcgaccaatacttgtactatctctcaaagactattaacggttctggacagaatcaacaaacgctaaaattcagtgtggccggacccagcaacatggctgtccagggaagaaactacatacctggacccagctaccgacaacaacgtgtctcaaccactgtgactcaaaacaacaacagcgaatttgcttggcctggagcttcttcttgggctctcaatggacgtaatagcttgatgaatcctggacctgctatggccagccacaaagaaggagaggaccgtttctttcctttgtctggatctttaatttttggcaaacaaggaactggaagagacaacgtggatgcggacaaagtcatgataaccaacgaagaagaaattaaaactactaacccggtagcaacggagtcctatggacaagtggccacaaaccaccagagtgcccaagcacaggcgcagaccggctgggttcaaaaccaaggaatacttccgggtatggtttggcaggacagagatgtgtacctgcaaggacccatttgggccaaaattcctcacacggacggcaactttcacccttctccgctgatgggagggtttggaatgaagcacccgcctcctcagatcctcatcaaaaacacacctgtacctgcggatcctccaacggccttcaacaaggacaagctgaactctttcatcacccagtattctactggccaagtcagcgtggagatcgagtgggagctgcagaaggaaaacagcaagcgctggaacccggagatccagtacacttccaactattacaagtctaataatgttgaatttgctgttaatactgaaggtgtatatagtgaaccccgccccattggcaccagatacctgactcgtaatctg

SEQ ID NO: 616 - DNA, 2208 bp, Artificial Sequence
  source: /note="Description of Artificial Sequence: Synthetic polynucleotide"
atggctgccgatggttatcttccagattggctcgaggacaaccttagtgaaggaattcgcgagtggtgggctttgaaacctggagcccctcaacccaaggcaaatcaacaacatcaagacaacgctcgaggtcttgtgcttccgggttacaaataccttggacccggcaacggactcgacaagggggagccggtcaacgcagcagacgcggcggccctcgagcacgacaaggcctacgaccagcagctcaaggccggagacaacccgtacctcaagtacaaccacgccgacgccgagttccaggagcggctcaaagaagatacgtcttttgggggcaacctcgggcgagcagtcttccaggccaaaaagaggcttcttgaacctcttggtctggttgaggaagcggctaagacggctcctggaaagaagaggcctgtagagcagtctcctcaggaaccggactcctccgcgggtattggcaaatcgggtgcacagcccgctaaaaagagactcaatttcggtcagactggcgacacagagtcagtcccagaccctcaaccaatcggagaacctcccgcagccccctcaggtgtgggatctcttacaatggcttcaggtggtggcgcaccagtggcagacaataacgaaggtgccgatggagtgggtagttcctcgggaaattggcattgcgattcccaatggctgggggacagagtcatcaccaccagcacccgaacctgggccctgcccacctacaacaatcacctctacaagcaaatctccaacagcacatctggaggatcttcaaatgacaacgcctacttcggctacagcaccccctgggggtattttgacttcaacagattccactgccacttctcaccacgtgactggcagcgactcatcaacaacaactggggattccggcctaagcgactcaacttcaagctcttcaacattcaggtcaaagaggttacggacaacaatggagtcaagaccatcgccaataaccttaccagcacggtccaggtcttcacggactcagactatcagctcccgtacgtgctcgggtcggctcacgagggctgcctcccgccgttcccagcggacgttttcatgattcctcagtacgggtatctgacgcttaatgatggaagccaggccgtgggtcgttcgtccttttactgcctggaatatttcccgtcgcaaatgctaagaacgggtaacaacttccagttcagctacgagtttgagaacgtacctttccatagcagctacgctcacagccaaagcctggaccgactaatgaatccactcatcgaccaatacttgtactatctctcaaagactattaacggttctggacagaatcaacaaacgctaaaattcagtgtggccggacccagcaacacggctgtccagggaagaaactacatacctggacccagctaccgacaacaacgtgtctcaaccactgtgactcaaaacaacaacagcgaatttgcttggcctggagcttcttcttgggctctcaatggacgtaatagcttgatgaatcctggacctgctatggccagccacaaagaaggagaggaccgtttctttcctttgtctggatctttaatttttggcaaacaaggaactggaagagacaacgtggatgcggacaaagtcatgataaccaacgaagaagaaattaaaactactaacccggtagcaacggagtcctatggacaagtggccacaaaccaccagagtgcccaagcacaggcgcagaccggctgggttcaaaaccaaggaatacttccgggtatggtttggcaggacagagatgtgtacctgcaaggacccatttgggccaaaattcctcacacggacggcaactttcacccttctccgctgatgggagggtttggaatgaagcacccgcctcctcagatcctcatcaaaaacacacctgtacctgcggatcctccaacggccttcaacaaggacaagctgaactctttcatcacccagtattctactggccaagtcagcgtggagatcgagtgggagctgcagaaggaaaacagcaagcgctggaacccggagatccagtacacttccaactattacaagtctaataatgttgaatttgctgttaatactgaaggtgtatatagtgaaccccgccccattggcaccagatacctgactcgtaatctg

SEQ ID NO: 617 - DNA, 2208 bp, Artificial Sequence
  source: /note="Description of Artificial Sequence: Synthetic polynucleotide"
atggctgccgatggttatcttccagattggctcgaggacaaccttagtgaaggaattcgcgagtggtgggctttgaaacctggagcccctcaacccaaggcaaatcaacaacatcaagacaacgctcgaggtcttgtgcttccgggttacaaataccttggacccggcaacggactcgacaagggggagccggtcaacgcagcagacgcggcggccctcgagcacgacaaggcctacgaccagcagctcaaggccggagacaacccgtacctcaagtacaaccacgccgacgccgagttccaggagcggctcaaagaagatacgtcttttgggggcaacctcgggcgagcagtcttccaggccaaaaagaggcttcttgaacctcttggtctggttgaggaagcggctaagacggctcctggaaagaagaggcctgtagagcagtctcctcaggaaccggactcctccgcgggtattggcaaatcgggtgcacagcccgctaaaaagagactcaatttcggtcagactggcgacacagagtcagtcccagaccctcaaccaatcggagaacctcccgcagccccctcaggtgtgggatctcttacaatggcttcaggtggtggcgcaccagtggcagacaataacgaaggtgccgatggagtgggtagttcctcgggaaattggcattgcgattcccaatggctgggggacagagtcatcaccaccagcacccgaacctgggccctgcccacctacaacaatcacctctacaagcaaatctccaacagcacatctggaggatcttcaaatgacaacgcctacttcggctacagcaccccctgggggtattttgacttcaacagattccactgccacttctcaccacgtgactggcagcgactcatcaacaacaactggggattccggcctaagcggctcaacttcaagctcttcaacattcaggtcaaagaggttacggacaacaatggagtcaagaccatcgccaataaccttaccagcacggtccaggtcttcacggactcagactatcagctcccgtacgtgctcgggtcggctcacgagggctgcctcccgccgttcccagcggacgttttcatgattcctcagtacgggtatctgacgcttaatgatggaagccaggccgtgggtcgttcgtccttttactgcctggaatatttcccgtcgcaaatgctaagaacgggtagcaacttccagttcagctacgagtttgagaacgtacctttccatagcagctacgctcacagccaaagcctggaccgactaatgaatccactcatcgaccaatacttgtactatctctcaaagactattaacggttctggacagaatcaacaaacgctaaaattcagtgtggccggacccagcaacatggctgtccagggaagaaactacatacctggacccagctaccgacaacaacgtgtctcaaccactgtgactcaaaacaacaacagcgaatttgcttggcctggagcttcttcttgggctctcaatggacgtaatagcttgatgaatcctggacctgctatggccagccacaaagaaggagaggaccgtttctttcctttgtctggatctttaatttttggcaaacaaggaactggaagagacaacgtggatgcggacaaagtcatgataaccaacgaagaagaaattaaaactactaacccggcagcaacggagtcctatggacaagtggccacaaaccaccagagtgcccaagcacaggcgcagaccggctgggttcaaaaccaaggaatacttccgggtatggtttggcaggacagagatgtgtacctgcaaggacccatttgggccaaaattcctcacacggacggcaactttcacccttctccgctgatgggagggtttggaatgaagcacccgcctcctcagatcctcatcaaaaacacacctgtacctgcggatcctccaacggccttcaacaaggacaagctgaactctttcatcacccagtattctactggccaagtcagcgtggagatcgagtgggagctgcagaaggaaaacagcaagcgctggaacccggagatccagcacacttccaactattacaagtctaataatgttgaatttgctgttaatactgaaggtgtatatagtgaaccccgccccattggcaccagatacctgactcgtaatctg

SEQ ID NO: 618 - DNA, 2208 bp, Artificial Sequence
  source: /note="Description of Artificial Sequence: Synthetic polynucleotide"
atggctgccgatggttatcttccagattggctcgaggacaaccttagtgaaggaattcgcgagtggtgggctttgaaacctggagcccctcaacccaaggcaaatcaacaacatcaagacaacgctcgaggtcttgtgcttccgggttacaaataccttggacccggcaacggactcgacaagggggagccggtcaacgcagcagacgcggcggccctcgagcacgacaaggcctacgaccagcagctcaaggccggagacaacccgtacctcaagtacaaccacgccgacgccgagttccaggagcggctcaaagaagatacgtcttttgggggcaacctcgggcgagcagtcttccaggccaaaaagaggcttcttgaacctcttggtctggttgaggaagcggctaagacggctcctggaaagaagaggcctgtagagcagtctcctcaggaaccggactcctccgcgggtattggcaaatcgggtgcacagcccgctaaaaagagactcaatttcggtcagactggcgacacagagtcagtcccagaccctcaaccaatcggagaacctcccgcagccccctcaggtgtgggatctcttacaatggcttcaggtggtggcgcaccagtggcagacaataacgaaggtgccgatggagtgggtagttcctcgggaaattggcattgcgattcccaatggctgggggacagagtcatcaccaccagcacccgaacctgggccctgcccacctacaacaatcacctctacaagcaaatctccaacagcacatctggaggatcttcaaatgacaacgcctacttcggctacagcaccccctgggggtattttgacttcaacagattccactgccacttctcaccacgtgactggcagcgactcatcaacaacaactggggattccggcctaagcgactcaacttcaggctcttcaacattcaggtcaaagaggttacggacaacaatggagtcaagaccatcgccaataaccttaccagcacggtccaggtcttcacggactcagactatcagctcccgtacgtgctcgggtcggctcacgagggctgcctcccgccgttcccagcggacgttttcatgattcctcagtacgggtatctgacgcttaatgatggaagccaggccgtgggtcgttcgtccttttactgcctggaatatttcccgtcgcaaatgctaagaacgggtaacaacttccagttcagctacgagtttgagaacgtacctttccatagcagctacgctcacagccaaagcctggaccgactaatgaatccactcatcgaccaatacttgtactatctctcaaagactattaacggttctggacagaatcaacaaacgctaaaattcagtgtggccggacccagcaacatggctgtccagggaagaaactacatacctggacccagctaccgacaacaacgtgtctcaaccactgtgactcaaaacaacaacagcgaatttgcttggcctggagcttcttcttgggctctcaatggacgtaatagcttgatgaatcctggacctgctatggccagccacaaagaaggagaggaccgtttctttcctttgtctggatctttaatttttggcaaacaaggaactggaagagacaacgtggatgcggacaaagtcatgataaccaacgaagaagaaattaaaactactaacccggtagcaacggagtcctatggacaagtggccacaaaccaccagagtgcccaagcacaggcgcagaccggctgggttcaaagccaaggaatacttccgggtatggtttggcaggacagagatgtgtacctgcaaggacccatttgggccaaaattcctcacacggacggcaactttcacccttctccgctgatgggagggtttggaatgaagcacccgcctccccagatcctcatcaaaaacacacctgtacctgcggatcctccaacggccttcaacaaggacaagctgaactctttcatcacccagtattctactggccaagtcagcgtggagatcgagtgggagctgcagaaggaaaacagcaagcgctggaacccggagatccagtacacttccaactattacaagtctaataatgttgaatttgctgttaatactgaaggtgtatatagtgaaccccgccccattggcaccagatacctgactcgtaatctg

SEQ ID NO: 619 - DNA, 2205 bp, Artificial Sequence
  source: /note="Description of Artificial Sequence: Synthetic polynucleotide"
atggctgccgatggttatcttccagattggctcgaggacaaccttagtgaaggaattcgcgagtggtgggctttgaaacctggagcccctcaacccaaggcaaatcaacaacatcaagacaacgcccgaggtcttgtgcttccgggttacaaataccttggacccggcaacggactcgacaagggggagccggtcaacgcagcagacgcggcggccctcgagcacgacaaggcctacgaccagcagctcaaggccggagacaacccgtacctcaagtacaaccacgccgacgccgagttccaggagcggctcaaagaagatacgtcttttgggggcaacctcgggcgagcagtcttccaggccaaaaagaggcttcttgaacctcttggtctggttgaggaagcggctaagacggctcctggaaagaagaggcctgtagagcagtctcctcaggaaccggactcctccgcgggtattggcaaatcgggtgcacagcccgctaaaaagagactcaatttcggtcagactggcgacacagagtcagtcccagaccctcaaccaatcggagaacctcccgcagccccctcaggtgtgggatctcttacaatggcttcaggtggtggcgcaccagtggcagacaataacgaaggtgccgatggagtgggtagttcctcgggaaattggcattgcgattcccaatggctgggggacagagtcatcaccaccagcacccgaacctgggccctgcccacctacaacaatcacctctacaagcaaatctccaacagcacatctggaggatcttcaaatgacaacgcctacttcggctacagcaccccctggaggtattttgacttcaacagattccactgccacttctcaccacgtgactggcagcgactcatcaacaactggggattccggcctaagcgactcaacttcaagctcttcaacattcaggtcaaagaggttacggacaacaatggagtcaagaccatcgccaataaccttaccagcacggtccaggccttcacggactcagactatcagctcccgtacgtgctcgggtcggctcacgagggctgcctcccgccgttcccagcggacgttttcatgattcctcagtacgggtatctgacgcttaatgatggaagccaggccgtgggtcgttcgtccttttactgcctggaatatttcccgtcgcaaatgctaagaacgggtaacaacttccagttcagctacgagtttgagaacgtacctttccatagcagctacgctcacagccaaagcctggaccgactaatgaatccactcatcgaccaatacttgtactatctctcaaagactattaacggttctggacagaatcaacaaacgctaaaattcagtgtggccggacccagcaacatggctgtccagggaagaaactacatacctggacccagctaccgacaacaacgtgtctcaaccactgtgactcaaaacaacaacagcgaatttgcttggcctggagcttcttcttgggctctcaatggacgtaatagcttgatgaatcctggacctgctatggccagccacaaagaaggagaggaccgtttctttcctttgtctggatctttaatttttggcaaacaaggaactggaagagacaacgtggatgcggacaaagtcatgataaccaacgaagaagaaattaaaactactaacccggtagcaacggagtcctatggacaagtggccacaaaccaccagagtgcccaagcacaggcgcagaccggctgggttcaaaaccaaggaatacttccgggtatggtttggcaggacagagatgtgtacctgcaaggacccatttgggccaaaattcctcacacggacggcaactttcacccttctccgctgatgggagggtttggaatgaagcacccgcctcctcagatcctcatcaaaaacacacctgtacctgcggatcctccaacggccttcaacaaggacgagctgaactctttcatcacccagtattctactggccaagtcagcgtggagatcgagtgggagctgcagaaggaaaacagcaagcgctggaacccggagatccagtacacttccaactattacaagtctaataatgttgaatttgctgttaatactgaaggtgtatatagtgaaccccgccccattggcaccagatacctgactcgtaatctg

SEQ ID NO: 620 - DNA, 2205 bp, Artificial Sequence
  source: /note="Description of Artificial Sequence: Synthetic polynucleotide"
atggctgccgatggttatcttccagattggctcgaggacaaccttagtgaaggaattcgcgagtggtgggctttgaaacctggagcccctcaacccaaggcaaatcaacaacatcaagacaacgctcgaggtcttgtgcttccgggttacaaataccttggacccggcaacggactcgacaagggggagccggtcaacgcagcagacgcggcggccctcgagcacgacaaggcctacgaccagcagctcaaggccggagacaacccgtacctcaagtacaaccacgccgacgccgagttccaggagcggctcaaagaagatacgtcttttgggggcaacctcgggcgagcagtcttccaggacaaaaagaggcttcttgaacctcttggtctggttgaggaagcggctaagacggctcctggaaagaagaggcctgtagagcagtctcctcaggaaccggactcctccgcgggtattggcaaatcgggtgcacagcccgctaaaaagagactcaatttcggtcagactggcgacacagagtcagtcccagaccctcaaccaatcggagaacctcccgcagccccctcaggtgtgggatctcttacaatggcttcaggtggtggcgcaccagtggcagacaataacgaaggtgccgatggagtgggtagttcctcgggaaattggcattgcgattcccaatggctgggggacagagtcatcaccaccagcacccgaacctgggccctgcccacctacaacaatcacctctacaagcaaatctccaacagcacatctggaggatcttcaaatgacaacgcctacttcggctacagcaccccctgggggtattttgacttcaacagattccactgccacttctcaccacgtgactggcagcgactcatcaacaactggggattccggcctaagcgactcaacttcaagctcttcaacattcaggtcaaagaggttacggacaacaatggagtcaagaccatcgccaataaccttaccagcacggtccaggtcttcacggactcagactatcagctcccgtacgtgctcgggtcggctcacgagggctgcctcccgccgttcccagcggacgttttcatgattcctcagtacgggtatctgacgcttaatgatggaagccaggccgtgggtcgttcgtccttttactgcctggaatatttcccgtcgcaaatgctaagaacgggtaacaacttccaattcagctacgagtttgagaacgtacctttccatagcagctacgctcacagccaaagcctggaccgactaatgaatccactcatcgaccaatacttgtactatctctcaaagactattaacggttctggacagaatcaacaaacgctaaaattcagtgtggccggacccagcaacatggctgtccagggaagaaactacatacctggacccagctaccgacaacaacgtgtctcaaccactgtgactcaaaacaacaacagcgaatttgcttggcctggagcttcttcttgggctctcaatggacgtaatagcttgatgaatcctggacctgctatggccagccacaaagaaggagaggaccgtttctttcctttgtctggatctttaatttttggcaaacaaggaactggaagagacaacgtggatgcggacaaagtcatgataaccaacgaagaagaaattaaaactactaacccggtagcaacggagtcctatggacaagtggccacaaaccaccagagtgcccaagcacaggcgcagaccggctgggttcaaaaccaaggaatacttccgggtatggtttggcaggacagagatgtgtacctgcaaggacccatttgggccaaaattcctcacacggacggcaactttcacccttctccgctgatgggagggtttggaatgaagcacccgcctcctcagatcctcatcaaaaacacacctgtacctgcggatcctccaacggccttcaacaaggacaagctgaactctttcatcacccagtattctactggccaagtcagcgtggagatcgagtgggagctgcagaaggaaaacagcaagcgctggaacccggagatccagtacacttccaactattacaagtctaataatgttgaatttgctgttaatactgaaggtgtatatagtgaaccccgccccattggcaccagatacctgactcgtaatctg

SEQ ID NO: 621 - DNA, 2208 bp, Artificial Sequence
  source: /note="Description of Artificial Sequence: Synthetic polynucleotide"
atggctgccgatggttatcttccagattggctcgaggacaaccttagtgaaggaattcgcgagtggtgggctttgaaacctggagcccctcaacccaaggcaaatcaacaacatcaagacaacgctcgaggtcttgtgcttccgggttacaaataccttggacccggcaacggactcgacaagggggagccggtcaacgcagcagacgcggcggccctcgagcacgacaaggcctacgaccagcagctcaaggccggagacaacccgtacctcaagtacaaccacgccgacgccgagttccaggagcggctcaaagaagatacgtcttttgggggcaacctcgggcgagcagtcttccaggccaaaaagaggcttcttgaacctcttggtctggttgaggaagcggctaagacggctcctggaaagaagaggcctgtagagcagtctcctcaggaaccggactcctccgcgggtattggcaaatcgggtgcacagcccgctaaaaagagactcaatttcggtcagactggcgacacagagtcagtcccagaccctcaaccaatcggagaacctcccgcagccccctcaggtgtgggatctcttacaatggcttcaggtggtggcgcaccagtggcagacaataacgaaggtgccgatggagtgggtagttcctcgggaaattggcattgcgattcccaatggctgggggacagagccatcaccaccagcacccgaacctgggccctgcccacctacaacaatcacctctacaagcaaatctccaacagcacatctggaggatcttcaaatgacaacgcctacttcggctacagcaccccctgggggtattttgacttcaacagattccactgccacttctcaccacgtgactggcagcggctcatcaacaacaactggggattccggcctaagcgactcaacttcaagctcttcaacattcaggtcaaagaggttacggacaacaatggagtcaagaccatcgccaataaccttaccagcacggtccaggtcttcacggactcagactatcagctcccgtacgtgctcgggtcggctcacgagggctgcctcccgccgttcccagcggacgttttcatgattcctcagtacgggtatctgacgcttaatgatggaagccaggccgtgggtcgttcgtccttttactgcctggaatatttcccgtcgcaaatgctaagaacgggtaacaacttccagttcagctacgagtttgagaacgtacctttccatagcagctacgctcacagccaaagcctggaccgactaatgaatccactcatcgaccaatacttgtactatctctcaaagactattaacggttctggacagaatcaacaaacgctaaaattcagtgtggccggacccagcaacatggctgtccagggaagaaactacatacctggacccagctaccgacaacaacgtgtctcaaccactgtgactcaaaacaacaacagcgaatttgcttggcctggagcttcttcttgggctctcaatggacgtaatagcttgatgaatcctggacctgctatggccagccacaaagaaggagaggaccgtttctttcctttgtctggatctttaatttttggcaaacaaggaactggaagagacaacgtggatgcggacaaagtcatgacaaccaacgaagaagaaattaaaactactaacccggtagcaacggagtcctatggacaagtggccacaaaccaccagagtgcccaagcacaggcgcagaccggctgggttcaaaaccaaggaatacttccgggtatggtttggcaggacagagatgtgtacctgcaaggacccatttgggccaaaattcctcacacggacggcaactttcacccttctccgctgatgggagggtttggaatgaagcacccgcctcctcagatcctcatcaaaaacacacctgtacctgcggatcctccaacggccttcaacaaggacaagctgaactctttcatcacccagtattctactggccaagtcagcgtggagatcgagtgggagctgcagaaggaaaacagcaagcgctggaacccggagatccagtacacttccaactattacaagtctaataatgttgaatttgctgttaatactgaaggtgtatatagtgaaccccgccccattggcaccagatacctgactcgtaatctg

SEQ ID NO: 622 - DNA, 2208 bp, Artificial Sequence
  source: /note="Description of Artificial Sequence: Synthetic polynucleotide"
atggctgccgatggttatcttccagattggctcgaggacaaccttagtgaaggaattcgcgagtggtgggctttgaaacctggagcccctcaacccaaggcaaatcaacaacatcaagacaacgctcgaggtcttgtgcttccgggttacaaataccttggacccggcaacggactcgacaagggggagccggtcaatgcagcagacgcggcggccctcgagcacgacaaggcctacgaccagcagctcaaggccggagacaacccgtacctcaagtacaaccacgccgacgccgagttccaggagcggctcaaagaagatacgtcttttgggggcaacctcgggcgagcagtcttccagaccaaaaagaggcttcttgaacctcttggtctggttgaggaagcggctaagacggctcctggaaagaagaggcctgtagagcagtctcctcaggaaccgggctcctccgcgggtattggcaaatcgggtgcacagcccgctaaaaagagactcaatttcggtcagactggcgacacagagtcagtcccagaccctcaaccaatcggagaacctcccgcagccccctcaggtgtgggatctcttacaatggcttcaggtggtggcgcaccagtggcagacaataacgaaggtgccgatggagtgggtagttcctcgggaaattggcattgcgattcccaatggctgggggacagagtcatcaccaccagcacccgaacctgggccctgcccacctacaacaatcacctctacaagcaaatctccaacagcacatctggaggatcttcaaatgacaacgcctacttcggctacagcaccccctgggggtattttgacttcaacagattccactgccacttctcaccacgtgactggcagcgactcatcaacaacaactggggattccggcctaagcgactcaacttcaagctcttcaacattcaggtcaaagaggttacggacaacaatggagtcaagaccatcgccaataaccttaccagcacggtccaggtcttcacggactcagactatcagctcccgtacgtgctcgggtcggctcacgagggctgcctcccgccgttcccagcggacgttttcatgattcctcagtacgggtatctgacgcttaatgatggaagccaggccgtgggtcgttcgtccttttactgcctggaatatttcccgtcgcaaatgctaagaacgggtaacaacttccagttcagctacgagtttgagaacgtacctttccatagcagctacgctcacagccaaagcctggaccgactaatgaatccactcatcgaccaatacttgcactatctctcaaagactattaacggttctggacagaatcaacaaacgctaaaattcagtgtggccggacccagcaacatggctgtccagggaagaaactacatacctggacccagctaccgacaacaacgtgtctcaaccactgtgactcaaaacaacaacagcgaatttgcttggcctggagcttcttcttgggctctcaatggacgtaatagcttgatgaatcctggacctgctatggccagccacaaagaaggagaggaccgtttctttcctttgtctggatctttaatttttggcaaacaaggaactggaagagacaacgtggatgcggacaaagtcatgataaccaacgaagaagaaattaaaactactaacccggtagcaacggagtcctatggacaagtggccacaaaccaccagagtgcccaagcacaggcgcagaccggctgggttcaaaaccaaggaatacttccgggtatggtttggcaggacagagatgtgtacctgcaaggacccatttgggccaaaattcctcacacggacggcaactttcacccttctccgctgatgggagggtttggaatgaagcacccgcctcctcagatcctcatcaaaaacacacctgtacctgcggatcctccaacggccttcaacaaggacaagctgaactctttcatcacccagtattctactggccaagtcagcgtggagatcgagtgggagctgcagaaggaaaacagcaagcgctggaacccggagatccagtacacttccaactattacaagtctaataatgttgaatttgctgttaatactgaaggtgtatatagtgaaccccgccccattggcaccagatacctgactcgtaatctg

SEQ ID NO: 623 - DNA, 2208 bp, Artificial Sequence
  source: /note="Description of Artificial Sequence: Synthetic polynucleotide"
atggctgccgatggttattttccagattggctcgaggacaaccttagtgaaggaattcgcgagtggtgggctttgaaacctggagcccctcaacccaaggcaaatcaacaacatcaagacaacgctcgaggtcttgtgcttccgggttacaaataccttggacccggcaacggactcgacaagggggagccggtcaacgcagcagacgcggcggccctcgagcacgacaaggcctacgaccagcagctcaaggccggagacaacccgtacctcaagtacaaccacgccgacgccgagttccaggagcggctcaaagaagatacgtcttttgggggcaacctcgggcgagcagtcttccaggccaaaaagaggcttcttgaacctcttggtctggttgaggaagcggctaagacggctcctggaaagaagaggcctgtagagcagtctcctcaggaaccggactcctccgcgggtattggcaaatcgggtgcacagcccgctaaaaagagactcaatttcggtcagactggcgacacagagtcagtcccagaccctcaaccaatcggagaatctcccgcagccccctcaggtgtgggatctcttacaatggcttcaggtggtggcgcaccagtggcagacaataacgaaggtgccgatggagtgggtagttcctcgggaaattggcattgcgattcccaatggctgggggacagagtcatcaccaccagcacccgaacctgggccctgcccacctacaacaatcacctctacaagcaaatctccaacagcacatctggaggatcttcaaatgacaacgcctacttcggctacagcaccccctgggggtattttgacttcaacagattccactgccacttctcaccacgtgactggcagcgactcatcaacaacaactggggattccggcctaagcgactcaacttcaagctcttcaacattcaggtcaaagaggttacggacaacaatggagtcaagaccatcgccaataaccttaccagcacggtccaggtcttcacggactcagactatcagctcccgtacgtgctcgggtcggctcacgagggctgcctcccgccgttcccagcggacgttttcatgattcctcagtacgggtatctgacgcttaatgatggaagccaggccgtgggtcgttcgtccttttactgcctggaatatctcccgtcgcaaatgctaagaacgggtaacaacttccagttcagctacgagtttgagaacgtacctttccatagcagctacgctcacagccaaagcctggaccgactaatgaatccactcatcgaccaatacttgcactatctctcaaagactattaacggttctggacagaatcaacaaacgctaaaattcagtgtggccggacccagcaacatggctgtccagggaagaaactacatacctggacccagctaccgacaacaacgtgtctcaaccactgtgactcaaaacaacaacagcgaatttgcttggcctggagcttcttcttgggctctcaatggacgtaatagcttgatgaatcctggacctgctgtggccagccacaaagaaggagaggaccgtttctttcctttgtctggatctttaatttttggcaaacaaggaactggaagagacaacgtggatgcggacaaagtcatgataaccaacgaagaagaaattaaaactactaacccggtagcaacggagtcctatggacaagtggccacaaaccaccagagtgcccaagcacaggcgcagaccggctgggttcaaaaccaaggaatacttccgggtatggtttggcaggacagagatgtgtacctgcaaggacccatttgggccaaaattcctcacacggacggcaactttcacccttctccgctgatgggagggtttggaatgaagcacccgcctcctcagatcctcatcaaaaacacacctgtacctgcggatcctccaacggccttcaacaaggacaagctgaactctttcatcacccagtattctactggccaagtcagcgtggagatcgagtgggagctgcagaaggaaaacagcaagcgctggaacccggagatccagtacacttccaactattacaagtctaataatgttgaatttgctgttaatactgaaggtgtatatagtgaaccccgccccattggcaccagatacctgactcgtaatctg

SEQ ID NO: 624 - DNA, 2208 bp, Artificial Sequence
  source: /note="Description of Artificial Sequence: Synthetic polynucleotide"
atggctgccgatggttatcttccagattggctcgaggacaaccttagtgaaggaattcgcgagtggtgggctttgaaacctggagcccctcaacccaaggcaaatcaacaacatcaagacaacgctcgaggtcttgtgcttccgggttacaaataccttggacccggcaacggactcgacaagggggagccggtcaacgcagcagacgcggcggccctcgagcacgacaaggcctacgaccagcagctcaaggccggagacaacccgtacctcaagtacaaccacgccgacgccgagttccaggagcggctcaaagaagatacgtcttttgggggcaacctcgggcgagcagtcttccaggccaaaaagaggcttcttgaacctcttggtccggttgaggaagcggctaagacggctcctggaaagaagaggcctgtagagcagtctcctcaggaaccggactcctccgcgggtattggcaaatcgggtgcacagcccgctaaaaagagactcaatttcggtcagactggcgacacagagtcagtcccagaccctcaaccaatcggagaacctcccgcagccccctcaggtgtgggatctcttacaatggcttcaggtggtggcgcaccagtggcagacaataacgaaggtgccgatggagtgggtagttcctcgggaaattggcattgcgattcccaatggctgggggacagagtcatcaccaccagcacccgaacctgggccctgcccacctacaacaatcacctctacaagcaaatctccaacagcacatctggaggatcttcaaatgacaacgcctacttcggctacagcaccccctgggggtattttgacttcaacagattccactgccacttctcaccacgtgactggcagcgactcatcaacaacaactggggattccggcctaagcgactcaacttcaagctcttcaacattcaggtcaaagaggttacggacaacaatggagtcaagaccatcgccaataaccttaccagcacggtccaggtcttcacggactcagactatcagctcccgtacgtgctcgggtcggctcacgagggctgcctcccgccgttcccagcggacgttttcatgattcctcagtacgggtatctgacgcttaatgatggaagccaggccgtgggtcgttcgtccttttactgcctggaatatttcccgtcgcaaatgctaagaacgggtaacaacttccagttcagctacgagtttgagaacgtacctttccatagcagctacgctcacagccaaagcctggaccgactaatgaatccactcatcgaccaatacttgtactatctctcaaagactattaacggttctggacagaatcaacaaacgctaaaattcagtgtggccggacccagcaacatggctgtccagggaagaaactacatacctggacccagctaccgacaacaacgtgtctcaaccactgtgactcaaaacaacaacagcgaatttgcttggcctggagcttcttcttgggctctcaatggacgtaatagcttgatgaatcctggacctgctatggccagccacaaagaaggagaggaccgtttctttcctttgtctggatctttaatttttggcaaacaaggaactggaagagacaacgtggatgcggacaaagtcatgataaccaacgaagaagaaattaaaactactaacccggtagcaacggagtcctatggacaagcggccacaaaccaccagagtgcccaagcacaggcgcagaccggctgggttcaaaaccaaggaatacttccgggtatggtttggcaggacagagatgtgtacctgcaaggacccatttgggccaaaattcctcacacggacggcaactttcacccttctccgctgatgggagggtttggaatgaagcacccgcctcctcagatcctcatcaaaaacacacctgtacctgcggatcctccaacggccttcaacaaggacaagctgaactctttcatcacccagtattctactggccaagtcagcgtggagatcgagtgggagctgcagaaggaaaacagcaagcgctggaacccggagatccagtacacttccaactattacaagtctaataatgttgaatttgctgttaatactgaaggtgtatatagtgaaccccgccccattggcaccagatacctgactcgtaatctg

SEQ ID NO: 625 - DNA, 2208 bp, Artificial Sequence
  source: /note="Description of Artificial Sequence: Synthetic polynucleotide"
atggctgccgatggttatcttccagattggctcgaggacaaccttagtgaaggaattcgcgagtggtgggctttgaaacctggagcccctcaacccaaggcaaatcaacaacatcaagacaacgctcggggtcttgtgcttccgggttacaaataccttggacccggcaacggactcgacaagggggagccggtcaacgcagcagacgcggcggccctcgagcacgacaaggcctacgaccagcagctcaaggccggagacaacccgtacctcaagtacaaccacgccgacgccgagttccaggagcggctcaaagaagatacgtcttttgggggcaacctcgggcgagcagtcttccaggccaaaaagaggcttcttgaacctcttggtccggttgaggaagcggctaagacggctcctggaaagaagaggcctgtagagcagtctcctcaggaaccggactcctccgcgggtattggcaaatcgggtgcacagcccgctaaaaagagactcaatttcggtcagactggcgacacagagtcagtcccagaccctcaaccaatcggagaacctcccgcagccccctcaggtgtgggatctcttacaatggcttcaggtggtggcgcaccagtggcagacaataacgaaggtgccgatggagtgggtagttcctcgggaaattggcattgcgattcccaatggctgggggacagagtcatcaccaccagcacccgaacctgggccctgcccacctacaacaatcacctctacaagcaaatctccaacagcacatctggaggatcttcaaatgacaacgcctacttcggctacagcaccccctgggggtattttgacttcaacagattccactgccacttctcaccacgtgactggcggcgactcatcaacaacaactggggattccggcctaagcgactcaacttcaagctcttcaacattcaggtcaaagaggttacggacaacaatggagtcaagaccatcgccaataaccttaccagcacggtccaggtcttcacggactcagactatcagctcccgtacgtgctcgggtcggctcacgagggctgcctcccgccgttcccagcggacgttttcatgattcctcagtacgggtatctgacgcttaatgatggaagccaggccgtgggtcgttcgtccttttactgcctggaatatttcccgtcgcaaatgctaagaacgggtaacaacttccagttcagctacgagtttgagaacgtacctttccatagcagctacgctcacagccaaagcctggaccgactaatgaatccactcatcgaccaatacttgtactatctctcaaagactattaacggttctggacagaatcaacaaacgctaaaattcagtgtggccggacccagcaacatggctgtccagggaagaaactacatacctggacccagctaccgacaacaacgtgtctcaaccactgtgactcaaaacaacaacagcgaatttgcttggcctggagcttcttcttgggctctcaatggacgtaatagcttgatgaatcctggacctgctatggccagccacaaagaaggagaggaccgtttctttcctttgtctggatctttaatttttggcaaacaaggaactggaagagacaacgtggatgcggacaaagtcatgataaccaacgaagaagaaattaaaactactaacccggtagcaacggagtcctatggacaagtggccacaaaccaccagagtgcccaagcacaggcgcagaccggctgggttcaaaaccaaggaatacttccgggtatggtttggcaggacagagatgtgtacctgcaaggacccatttgggccaaaattcctcacacggacggcaactttcacccttctccgctgatgggagggtttggaatgaagcacccgcctcctcagatcctcatcaaaaacacacctgtacctgcggatcctccaacggccttcaacaaggacaagctgaactctttcatcacccagtattctactggccaagtcagcgtggagatcgagtgggagctgcagaaggaaaacagcaagcgctggaacccggagatccagtacacttccaactattacaagtctaataatgttgaatttgctgttaatactgaaggtgtatatagtgaaccccgccccattggcaccagatacctgactcgtaatctg

SEQ ID NO: 626 - DNA, 2208 bp, Artificial Sequence
  source: /note="Description of Artificial Sequence: Synthetic polynucleotide"
atggctgccgatggttatcttccagattggctcgaggacaaccttagtgaaggaattcgcgagtggtgggctttgaaacctggagcccctcaacccaaggcaaatcaacaacatcaagacaacgctcgaggtcttgtgcttccgggttacaaataccttggacccggcaacggactcgacaagggggagccggtcaacgcagcagacgcggcggccctcgagcacgacaaggcctacgaccagcagctcaaggccggagacaacctgtacctcaagtacaaccacgccgacgccgagttccaggagcggctcaaagaagatacgtcttttgggggcaacctcgggcgagcagtcttccaggccaaaaagaggcttcttgaacctcttggtctggttgaggaagcggctaagacggctcctggaaagaagaggcctgtagagcagtctcctcaggaaccggactcctccgcgggtattggcaaatcgggtgcacagcccgctaaaaagagactcaatttcggtcagactggcgacacagagtcagtcccagaccctcaaccaatcggagaacctcccgcagccccctcaggtgtgggatctcttacaatggcttcaggtggtggcgcaccagtggcagacaataacgaaggtgccgatggagtgggtagttcctcgggaaattggcattgcgattcccaatggctgggggacagagtcatcaccaccagcacccgaacctgggccctgcccacctacaacaatcacctctacaagcaaatctccaacagcacatctggaggatcttcaaatgacaacgcctacttcggctacagcaccccctgggggtattttgacttcaacagattccactgccacttctcaccacgtgactggcagcgactcatcaacaacaactggggattccggcctaagcgactcaacttcaagctcttcaacattcaggtcaaagaggttacggacaacaatggagtcaagaccatcgccaataaccttaccagcacggtccaggtcttcacggactcagactatcagctcccgtacgtgctcgggtcggctcacgagggctgcctcccgccgttcccagcggacgttttcatgattcctcagtacgggtatctgacgcttaatgatggaagccaggccgtgggtcgttcgtccttttactgcctggaatatttcccgtcgcaaatgctaagaacgggtaacaacttccagttcagctacgagtttgagaacgtacctttccatagcagctacgctcacagccaaagcctggaccgactaatgaatccactcatcgaccaatacttgcactatctctcaaagactattaacggttctggacagaatcaacaaacgctaaaattcagtgtggccggacccagcaacatggctgtccagggaagaaactacatacctggacccagctaccgacaacaacgtgtctcaaccactgtgactcaaaacaacaacagcgaatttgcttggcctggagcttcttcttgggctctcaatggacgtaatagcttgatgaatcctggacctgctatggccagccacaaagaaggagaggaccgtttctttcctttgtctggatctttaatttttggcaaacaaggaactggaagagacaacgtggatgcggacaaagtcatgataaccaacgaagaagaaattaaaactactaacccggtagcaacggagtcctatggacaagtggccacaaaccaccagagtgcccaagcacaggcgcagaccggctgggttcaaaaccaaggaatacttccgggtatggtttggcaggacagagatgtgtacctgcaaggacccatttgggccaaaattcctcacacggacggcaactttcacccttctccgctgatgggagggtttggaatgaagcacccgcctcctcagatcctcatcaaaaacacacctgtacctgcggatcctccaacggccttcaacaaggacaagctgaactctttcatcacccagtattctactggccaagtcagcgtggagatcgagtgggagctgcagaaggaaaacagcaagcgctggaacccggagatccagtacacttccaactattacaagtctaataatgttgaatttgctgttaatactgaaggtgtatatagtgaaccccgccccattggcaccagatacctgactcgtaatctg

SEQ ID NO: 627 - DNA, 2208 bp, Artificial Sequence
  source: /note="Description of Artificial Sequence: Synthetic polynucleotide"
atggctgccgatggttatcttccagattggctcgaggacaaccttagtgaaggaattcgcgagtggtgggctttgaaacctggagcccctcaacccaaggcaaatcaacaacatcaagacaacgctcgaggtcttgtgcttccgggttacaaataccttggacccggcaacggactcgacaagggggagccggtcaacgcagcagacgcggcggccctcgagcacgacaaggcctacgaccagcagctcaaggccggagacaacccgtacctcaagtacaaccacgccgacgccgagttccaggagcggctcaaagaagatacgtcttttgggggcaacctcgggcgagcagtcttccaggccaaaaagaggcttcttgaacctcttggtctggttgaggaagcggctaagacggctcctggaaagaagaggcctgtagagcagtctcctcaagaaccggactcctccgcgggtattggcaaatcgggtgcacagcccgctaaaaagagactcaatttcggtcagactggcgacacagagtcagtcccagaccctcaaccaatcggagaacctcccgcagccccctcaggtgtgggatctcttacaatggcttcaggtggtggcgcaccagtggcagacaataacgaaggtgccgatggagtgggtagttcctcgggaaattggcattgcgattcccaatggctgggggacagagtcatcaccaccagcacccgaacctgggccctgcccacctacaacaatcacctctacaagcaaatctccaacagcacatctggaggatcttcaaatgacaacgcctacttcggctacagcaccccctgggggtattttgacttcaacagattccactgccacttctcaccacgtgactggcagcgactcatcaacaacaactggggattccggcctaagcgactcaacttcaagctcttcaacattcaggtcaaagaggttacggacaacaatggagtcaagaccatcgccaataaccttaccagcacggtccaggtcttcacggactcagactatcagctcccgtacgtgctcgggtcggctcacgagggctgcctcccgccgttcccagcggacgttttcatgattcctcagtacgggtatctgacgcttaatgatggaagccaggccgtgggtcgttcgtccttttactgcctggaatatttcccgtcgcaaatgctaagaacgggtaacaacttccagttcagctacgagtttgagaacgtacctttccatagcagctacgctcacagccaaagcctggaccgactaatgaatccactcatcgaccaatacttgcactatctctcaaagactattaacggttctggacagaatcaacaaacgctaaaattcagtgtggccggacccagcaacatggctgtccagggaagaaactacatacctggacccagctaccgacaacaacgtgtctcaaccactgtgactcaaaacaacaacagcgaatttgcttggcctggagcttcttcttgggctctcaatggacgtaatagcttgatgaatcctggacctgctatggccagccacaaagaaggagaggaccgtttctttcctttgtctggatctttaatttttggcaaacaaggaactggaagagacaacgtggatgcggacaaagtcatgataaccaacgaagaagaaattaaaactactaacccggtagcaacggagtcctatggacaagtggccacaaaccaccagagtgcccaagcacaggcgcagaccggctgggttcaaaaccaaggaatacttccgggtatggtttggcaggacagagatgtgtacctgcaaggacccatttgggccaaaattcctcacacggacggcaactttcacccttctccgctgatgggagggtttggaatgaagcacccgcctcctcagatcctcatcaaaaacacacctgtacctgcggatcctccaacggccttcaacaaggacaagctgaactctttcatcacccagtattctactggccaagtcagcgtggagatcgagtgggagctgcagaaggaaaacagcaagcgctggaacccggagatccagtacacttccaactattacaagtctaataatgttgaatttgctgttaatactgaaggtgtatatagtgaaccccgccccattggcaccagatacctgactcgtaatctg

SEQ ID NO: 628 - DNA, 2208 bp, Artificial Sequence
  source: /note="Description of Artificial Sequence: Synthetic polynucleotide"
  modified_base (1325)..(1325): a, c, t, or g
atggctgccgatggttatcttccagattggctcgaggacaaccttagtgaaggaattcgcgagtggtgggctttgaaacctggagcccctcaacccaaggcaaatcaacaacatcaagacaacgctcgaggtcttgtgcttccgggttacaaataccttggacccggcaacggactcgacaagggggagccggtcaacgcagcagacgcggcggccctcgagcacgacaaggcctacgaccagcagctcaaggccggagacaacccgtacctcaagtacaaccacgccgacgccgagttccaggagcggctcaaagaagatacgtcttttgggggcaacctcgggcgagcagtcttccaggccaaaaagaggcttcttgaacctcttggtctggttgaggaagcggctaagacggctcctggaaagaagaggcctgtagagcagtctcctcaggaaccggactcctccgcgggtattggcaaatcgggtgcacagcccgctaaaaagagactcaatttcggtcagactggcgacacagagtcagtcccagaccctcaaccaatcggagaacctcccgcagccccctcaggtgtgggatctcttacaatggcttcaggtggtggcgcaccagtggcagacaataacgaaggtgccgatggagtgggtagttcctcgggaaattggcattgcgattcccaatggctgggggacagagtcatcaccaccagcacccgaacctgggccctgcccacctacaacaatcacctctacaagcaaatctccaccagcacatctggaggatcttcaaatgacaacgcctacttcggctacagcaccccctgggggtattttgacttcaacagattccactgccacttctcaccacgtgactggcagcgactcatcaacaacaactggggattccggcctaagcgactcaacttcaagctcttcaacattcaggtcaaagaggttacggacaacaatggagtcaagaccatcgccaataaccttaccagcacggtccaggtcttcacggactcagactatcagctcccgtacgtgctcgggtcggctcacgagggctgcctcccgccgttcccagcggacgttttcatgattcctcagtacgggtatctgacgcttaatgatggaagccaggccgtgggtcgttcgtccttttactgcctggaatatttcccgtcgcaaatgctaagaacgggtaacaacttccagttcagctacgagtttgagaacgtacctttccatagcagctacgctcacagccaaagcctggaccgactaatgaatccactcatcgaccnatacttgcactatctctcaaagactattaacggttctggacagaatcaacaaacgctaaaattcagtgtggccggacccagcaacatggctgtccagggaagaaactacatacctggacccagctaccgacaacaacgtgtctcaaccactgtgactcaaaacaacaacagcgaatttgcttggcctggagcttcttcttgggctctcaatggacgtaatagcttgatgaatcctggacctgctatggccagccacaaagaaggagaggaccgtttctttcctttgtctggatctttaatttttggcaaacaaggaactggaagagacaacgtggatgcggacaaagtcatgataaccaacgaagaagaaattaaaactactaacccggtagcaacggagtcctatggacaagtggccacaaaccaccagagtgcccaagcacaggcgcagaccggctgggttcaaaaccaaggaatacttccggatatggtttggcaggacagagatgtgtacctgcaaggacccatttgggccaaaattcctcacacggacggcaactttcacccttctccgctgatgggagggtttggaatgaagcacccgcctcctcagatcctcatcaaaaacacacctgtacctgcggatcctccaacggccttcaacaaggacaagctgaactctttcatcacccagtattctactggccaagtcagcgtggagatcgagtgggagctgcagaaggaaaacagcaagcgctggaacccggagatccagtacacttccaactattacaagtctaataatgttgaatttgctgttaatactgaaggtgtatatagtgaaccccgccccattggcaccagatacctgactcgtaatctg

SEQ ID NO: 629 - DNA, 2208 bp, Artificial Sequence
  source: /note="Description of Artificial Sequence: Synthetic polynucleotide"
atggctgccgatggttatcttccagattggctcgaggacaaccttagtgaaggaattcgcgagtggtgggctttgaaacctggagcccctcaacccaaggcaaatcaacaacatcaagacaacgctcgaggtcttgtgcttccgggttacaaataccttggacccggcaacggactcgacaagggggagccggtcaacgcagcagacgcggcggccctcgagcacgacaaggcctacgaccagcagctcaaggccggagacaacccgtacctcaagtacaaccacgccgacgccgagttccaggagcggctcaaagaagatacgtcttttgggggcaacctcgggcgagcagtcttccaggccaaaaagaggcttcttgaacctcttggtctggttgaggaagcggctaagacggctcctggaaagaagaggcctgtagagcagtctcctcaggaaccggactcctccgcgggtattggcaaatcgggtgcacagcccgctaaaaagagactcaatttcggtcagactggcgacacagagtcagtcccagaccctcaaccaatcggagaacctcccgcagccccctcaggtgtgggatctcttacaatggcttcaggtggtggcgcaccagtggcagacaataacgaaggtgccgatggagtgggtagttcctcgggaaattggcattgcgattcccaatggctgggggacagagtcatcaccaccagcacccgaacctgggccctgcccacctacaacaatcacctctacaagcaaatctccaacagcacatctggaggatcttcaaatgacaacgcctacttcggctacagcaccccctgggggtattttgacttcaacagattccactgccacttctcaccacgtgactggcagcgactcatcaacaacaactggggattccggcctaagcgactcaacttcaagctcttcaacattcaggtcaaagaggttacggacaacaatggagtcaagaccatcgccaataaccttaccagcacggtccaggtcttcacggactcagactatcagctcccgtacgtgctcgggtcggctcacgagggctgcctcccgccgttcccagcggacgttttcatgattcctcagtacgggtatctgacgcttaatgatggaagccaggccgtgggtcgttcgtccttttactgcctggaatatttcccgtcgcaaatgctaagaacgggtaacaacttccagttcagctacgagtttgagaacgtacctttccatagcagctacgctcacagccaaagcctggaccgactaatgaatccactcatcgaccaatacttgcactatctctcaaagactattaacggttctggacagaatcaacaaacgctaaaattcagtgtggccggacccagcaacatggctgtccagggaagaaactacatacctggacccagctaccgacaacaacgtgtctcaaccactgtgactcaaaacaacaacagcgaatttgcttggcctggagcttcttcttgggctctcaatggacgtaatagcttgatgaatcctggacctgctatggccagctacaaagaaggagaggacagtttctttcctttgtctggatctttaatttttggcaaacaaggaactggaagagacaacgtggatgcggacaaagtcatgataaccaacgaagaagaaattaaaactactaacccggtagcaacggagtcctatggacaagtggccacaaaccaccagagtgcccaagcacaggcgcagaccggctgggttcaaaaccaaggaatacttccgggtatggtttggcaggacagagatgtgtacctgcaaggacccatttgggccaaaattcctcacacggacggcaactttcacccttctccgctgatgggagggtttggaatgaagcacccgcctcctcagaccctcatcaaaaacacacctgtacctgcggatcctccaacggccttcaacaaggacaagctgaactctttcatcacccagtattctactggccaagtcagcgtggagatcgagtgggagctgcagaaggaaaacagcaagcgctggaacccggagatccagtacacttccaactattacaagtctaataatgttgaatttgctgttaatactgaaggtgtatatagtgaaccccgccccattggcaccagatacctgactcgtaatctg

SEQ ID NO: 630 - DNA, 2208 bp, Artificial Sequence; identical to SEQ ID NO: 613
  source: /note="Description of Artificial Sequence: Synthetic polynucleotide"

SEQ ID NO: 631 - DNA, 2208 bp, Artificial Sequence
  source: /note="Description of Artificial Sequence: Synthetic polynucleotide"
atggctgccgatggttatcttccagattggctcgaggacaaccttagtgaaggaattcgcgagtggtgggctttgaaacctggagcccctcaacccagggcaaatcaacaacatcaagacaacgctcgaggtcttgtgcttccgggttacaaataccttggacccggcaacggactcgacaagggggagccggtcaacgcagccgacgcggcggccctcgagcacgacaaggcctacgaccagcagctcaaggccggagacaacccgtacctcaagtacaaccacgccgacgccgagttccaggagcggctcaaagaagatacgtcttttgggggcaacctcgggcgagcagtcttccaggccaaaaagaggcttcttgaacctcttggtctggttgaggaagcggctaagacggctcctggaaagaagaggcctgtagagcagtctcctcaggaaccggactcctccgcgggtattggcaaatcgggtgcacagcccgctaaaaagagactcaatttcggtcagactggcgacacagagtcagtcccagaccctcaaccaatcggagaacctcccgcagccccctcaggtgtgggatctcttacaatggcttcaggtggtggcgcaccagtggcagacaataacgaaggtgccgatggagtgggtagttcctcgggaaattggcattgcgattcccaatggctgggggacagagtcatcaccaccagcacccgaacctgggccctgcccacctacaacaatcacctctacaagcaaatctccaacagcacatctggaggatcttcaaatgacaacgcctacttcggctacagcaccccctgggggtattttgacttcaacagattccactgccacttctcaccacgtgactggcagcgactcatcaacaacaactggggattccggcctaagcgactcaacttcaagctcttcaacattcaggtcaaagaggttacggacaacaatggagtcaagaccatcgccaataaccttaccagcacggtccaggtcttcacggactcagactgtcagctcccgtacgtgctcgggtcggctcacgagggctgcctcccgccgttcccagcggacgttttcatgattcctcagtacgggtatctgacgcttaatgatggaagccaggccgtgggtcgttcgtccttttactgcctggaatatttcccgtcgcaaatgctaagaacgggtaacaacttccagttcagctacgagtttgagaacgtacctttccatagcagctacgctcacagccaaagcctggaccgactaacgaatccactcatcgaccaatacttgtactatctctcaaagactattaacggttctggacagaatcaacaaacgctaaaattcagtgtggccggacccagcaacatggctgtccagggaagaaactacatacctggacccagctaccgacaacaacgtgtctcaaccactgtgactcaaaacaacaacagcgaatttgcttggcctggagcttcttcttgggctctcaatggacgtaatagcttgatgaatcctggacctgctatggccagccacaaagaaggagaggaccgtttctttcctttgtctggatctttaatttttggcaaacaaggaactggaagagacaacgtggatgcggacaaagtcatgataaccaacgaagaagaaattaaaactactaacccggtagcaacggagtcccatggacaagtggccacaaaccaccagagtgcccaagcacaggcgcagaccggctgggttcaaaaccaaggaatacttccgggtatggtttggcaggacagagatgtgtacctgcaaggacccatttgggccaaaattcctcacacggacggcaactttcacccttctccgctgatgggagggtttggaatgaagcacccgcctcctcagatcctcatcaaaaacacacctgtacctgcggatcctccaacggccttcaacaaggacaagctgaactctttcatcacccagtattctactggccaagtcagcgtggagatcgagtgggagctgcagaaggaaaacagcaagcgctggaacccggagatccagtacacttccaactattacaagtctaataatgttgaatttgctgttaatactgaaggtgtatatagtgaaccccgccccattggcaccagatacctgactcgtaatctg

SEQ ID NO: 632 - DNA, 2208 bp, Artificial Sequence
  source: /note="Description of Artificial Sequence: Synthetic polynucleotide"
atggctgccgatggttatcttccagattggctcgaggacaaccttagtgaaggaattcgcgagtggtgggctttgaaacctggagcccctcaacccaaggcaaatcaacaacatcaagacaacgctcgaggtcttgtgcttccgggttacaaataccttggacccggcaacggactcgacaagggggagccggtcaacgcagcagacgcggcggccctcgagcacgacaaggcctacgaccagcagctcaaggccggagacaacccgtacctcaagtacaaccacgccgacgccgagttccaggagcggctcaaagaagatacgtcttttgggggcaacctcgggcgagcagtcttccaggccaaaaagaggcttcttgaacctcttggtctggttgaggaagcggctaagacggctcctggaaagaagaggcctgtagagcagtctcctcaggaaccggactcctccgcgggtattggcaaatcgggtgcacagcccgctaagaagagactcaatttcggtcagactggcgacacagagtcagtcccagaccctcaaccaatcggagaacctcccgcagccccctcaggtgtgggatctcttacaatggcttcaggtggtggcgcaccagtggcagacaataacgaaggtgccgatggagtgggtagttcctcgggaaattggcattgcgattcccaatggctgggggacagagtcatcaccaccagcacccgaacctgggccctgcccacctacaacaatcacctctacaagcaaatctccaacagcacatctggaggatcttcaaatgacaacgcctacttcggctacagcaccccctgggggtattttgacttcaacagattccactgccacttctcaccacgtgactggcagcgactcatcaacaacaactggggattccggcctaagcgactcaacttcaagctcttcaacattcaggtcaaagaggttacggacaacaatggagtcaagaccatcgccaataaccttaccagcacggtccaggtcttcacggactcagactatcagctcccgtacgtgctcgggtcggctcacgagggctgcctcccgccgttcccagcggacgttttcatgattcctcagtacgggtatctgacgcttaatgatggaagccaggccgtgggtcgttcgtccttttactgcctggaatatttcccgtcgcaaatgctaagaacgggtaacaacttccagttcagctacgagtttgagaacgtacctttccatagcagctacgctcacagccaaagcctggaccgactaatgaatccacccatcgaccaatacttgtactatctctcaaagactattaacggttctggacagaatcaacaaacgctaaaattcagtgtggccggacccagcaacatggctgtccagggaagaaactacatacctggacccagctaccgacaacaacgtgtctcaaccactgtgactcaaaacaacaacagcgaatttgcttggcctggagcttcttcttgggctctcaatggacgtaatagcttgatgaatcctggacctgctatggccagccacaaagaaggagaggaccgtttctttcctttgtctggatctttaatttttggcaaacaaggaactggaagagacaacgtggatgcggacaaagtcatgataaccaacgaagaagaaattaaaactactaacccggtagcaacggagtcctatggacaagtggccacaaaccaccagagtgcccaagcacaggcgcagaccggctgggttcaaaaccaaggaatacttccgggtatggtttggcaggacagagatgtgtacctgcaaggacccatttgggccaaaattcctcacacggacggcaactttcacccttctccgctgatgggagggtttggaatgaagcacccgcctcctcagatcctcatcaaaaacacacctgtacctgcggatcctccaacggccttcaacaaggacaagctgaactctttcatcacccagtattctactggccaagtcagcgtggagatcgagtgggagctgcagaaggaaaacagcaagcgctggaacccggagatccagtacacttccaactattacaagtctaataatgttgaatttgctgttaatactgaaggtgtatatggtgaaccccgccccattggcaccagatacctgactcgtaatctg

SEQ ID NO: 633 - DNA, 2208 bp, Artificial Sequence
  source: /note="Description of Artificial Sequence: Synthetic polynucleotide"
atggctgccgatggttatcttccagattggctcgaggacaaccttagtgaaggaattcgcgagtggtgggctttgaaacctggagcccctcaacccaaggcaaatcaacaacatcaagacaacgctcgaggtcttgtgcttccgggttacaaataccttggacccggcaacggactcgacaagggggagccggtcaacgcagcagacgcggcggccctcgagcacgacaaggcctacgaccagcagctcaaggccggagacaacccgtacctcaagtacaaccacgccgacgccgagttccaggagcggctcaaagaagatacgtcttttgggggcaacctcgggcgagcagtcttccaggccaaaaagaggcttcttgaacctcttggtctggttgaggaagcggctaagacggctcctggaaagaagaggcctgtagagcagtctcctcaggaaccggactcctccgcgggtattggcaaatcgggtgcacagcccgctaaaaagagactcaatttcggtcagactggcgacacagagtcagtcccagaccctcaaccaatcggagaacctcccgcagccccctcaggtgtgggatctcttacaatggcttcaggtggtggcgcaccagtggcagacaataacgaaggtgccgatggagtgggtagttcctcgggaaattggcattgcgattcccaatggctgggggacagagtcatcaccaccagcacccgaacctgggccctgcccacctacaacaatcacctctacaagcaaatctccaacagcacatctggaggatcttcaaatgacaacgcctacttcggctacagcaccccctgggggtattttgacttcaacagattccactgccacttctcaccacgtgaccggcagcgactcatcaacaacaactggggattccggcctaagcgactcaacttcaagctcttcaacattcaggtcaaagaggttacggacaacaatggagtcaagaccatcgccaataaccttaccagcacggtccaggtcttcacggactcagactatcagctcccgtacgtgctcgggtcggctcacgagggctgcctcccgccgttcccagcggacgttttcatgattcctcagtacgggtatctgacgcttaatgatggaagccaggccgtgggtcgttcgtccttttactgcctggaatatttcccgtcgcaaatgctaagaacgggtaacaacttccagttcagctacgagtttgagaacgtacctttccatagcagctacgctcacagccaaagcctggaccgactaatgaatccactcatcgaccaatacttgtactatctctcaaagactattaacggttctggacagaatcaacaaacgctaaaattcagtgtggccggacccagcaacatggctgtccagggaagaaactacatacctggacccagctaccgacaacaacgtgtctcaaccactgtgactcaaaacaacaacagcgaatttgcttggcctggagcttcttcttgggctctcaatggacgtaatagcttgatgaatcctggacctgctatggccagccacaaagaaggagaggaccgtttctttcctttgtctggatctttaatttttggcaaacaaggaactggaagagacaacgtggatgcggacaaagtcatgataaccaacgaagaagaaattaaaactactaacccggtagcaacggagtcctatggacaagtggccacaaaccaccagagtgcccaagcacaggcgcagaccggctgggttcaaaaccaaggaatacttccgggtatggtttggcaggacagagatgtgtacctgcaaggacccatttgggccaaaattcctcacacggacggcaactttcacccttctccgctgatgggagggtttggaatgaagcacccgcctcctcagatcctcatcaaaaacacacctgtacctgcggatcctccaacggccttcaacaaggacaagctgaactctttcatcacccagtattctactggccaagtcagcgtggagatcgagtgggagctgcagaaggaaaacagcaagcgctggaacccggagatccagtacacttccaactattacaagtctaataatgttgaatttgctgttaatactgaaggtgtatatagtgaaccccgccccattggcaccagatacctgactcgtaatctg

SEQ ID NO: 634 - DNA, 2208 bp, Artificial Sequence
  source: /note="Description of Artificial Sequence: Synthetic polynucleotide"
atggctgccgatggttatcttccagattggctcgaggacaaccttagtgaaggaattcgcgagtggtgggctttgaaacctggagcccctcaacccaaggcaaatcaacaacatcaagacaacgctcgaggtcttgtgcttccgggttacaaataccttggacccggcaacggactcgacaagggggagccggtcaacgcagcagacgcggcagccctcgagcacgacaaggcctacgaccagcagctcaaggccggagacaacccgtacctcaagtacaaccacgccgacgccgagttccaggagcggctcaaagaagatacgtcttttgggggcaacctcgggcgagcagtcttccaggccaaaaagaggcttcttgaacctcttggtctggttgaggaagcggctaagacggctcctggaaagaagaggcctgtagagcagtctcctcaggaaccggactcctccgcgggtattggcaaatcgggtgcacagcccgctaaaaagagactcaatttcggtcagactggcgacacagagtcagtcccagaccctcaaccaatcggagaacctcccgcagccccctcaggtgtgggatctcttacaatggcttcaggtggtggcgcaccagtggcagacaataacgaaggtgccgatggagtgggtagttcctcgggaaattggcattgcaattcccaatggctgggggacagagtcatcaccaccagcacccgaacctgggccctgcccacctacaacaatcacctctacaagcaaatctccaacagcacatctggaggatcttcaaatgacaacgcctacttcggctacagcaccccctgggggtattttgacttcaacagattccactgccacttctcaccacgtgactggcagcgactcatcaacaacaactggggattccggcctaagcgactcaacttcaagctcttcaacattcaggtcaaagaggttacggacaacaatggagtcaagaccatcgccaataaccttaccagcacggtccaggtcttcacggactcagactatcagctcccgtacgtgctcgggtcggctcacgagggctgcctcccgccgttcccagcggacgttttcatgattcctcagtacgggtatctgacgcttaatgatggaagccaggccgtgggtcgttcgtccttttactgcctggaatatttcccgtcgcaaatgctaagaacgggtaacaacttccagttcagctacgagtttgagaacgtacctttccatagcagctacgctcacagccaaagcctggaccgactaatgaatccactcatcgaccaatacttgtactatctctcaaagactattaacggttctggacagaatcaacaaacgctaaaattcagtgtggccggacccggcaacatggctgtccagggaagaaactacatacctggacccagctaccgacaacaacgtgtctcaaccactgtgactcaaaacaacaacagcgaatttgcttggcctggagcttcttcttgggctctcaatggacgtaatagcttgatgaatcctggacctgctatggccagccacaaagaaggagaggaccgtttctttcctttgtctggatctttaatttttggcaaacaaggaactggaagagacaacgtggatgcggacaaagtcatgataaccaacgaagaagaaattaaaactactaacccggtagcaacggagtcctatggacaagtggccacaaaccaccagagtgcccaagcacaggcgcagaccggctgggttcaaaaccaaggaatacttccgggtatggtttggcaggacagagatgtgtacctgcaaggacccatttgggccaaaattcctcacacggacggcaactttcacccttctccgctgatgggagggtttggaatgaagcacccgcctcctcagatcctcatcaagaacacacctgtacctgcggatcctccaacggccttcaacaaggacaagctgaactctttcatcacccagtattctactggccaagtcagcgtggagatcgagtgggagctgcagaaggaaaacagcaagcgctggaacccggagatccagtacacttccaactattacaagtctaataatgttgaatttgctgttaatactgaaggtgtatatagtgaaccccgccccattggcaccagatacctgactcgtaatctg

SEQ ID NO: 635 - DNA, 2208 bp, Artificial Sequence
  source: /note="Description of Artificial Sequence: Synthetic polynucleotide"
atggctgccgatggttatcttccagattggctcgaggacaaccttagtgaaggaattcgcgagtggtgggctttgaaacctggagcccctcaacccaaggcaaatcaacaacatcaagacaacgctcgaggtcttgtgcttccgggttacagataccttggacccggcaacggactcgacaagggggagccggtcaacgcagcagacgcggcggccctcgagcacgacaaggcctacgaccagcagctcaaggccggagacaacccgtacctcaagtacaaccacgccgacgccgagttccaggagcggctcaaagaagatacgtcttttgggggtaacctcgggcgagcagtcttccaggccaaaaagaggcttcttgaacctcttggtctggttgaggaagcggctaagacggctcctggaaagaagaggcctgtagagcagtctcctcaggaaccggactcctccgcgggtatcggcaaatcgggtgcacagcccgctaaaaagagactcaatttcggtcagactggcgacacagagtcagtcccagaccctcaaccaatcggagaacctcccgcagccccctcaggtgtgggatctcttacaatggcttcaggtggtggcgcaccagtggcagacaataacgaaggtgccgatggagtgggtagttcctcgggaaattggcattgcgattcccaatggctgggggacagagtcatcaccaccagcacccgaacctgggccctgcccacctacaacaatcacctctacaagcaaatctccaacagcacatctggaggatcttcaaatgacaacgcctacttcggctacagcaccccctgggggtattttgacttcaacagattccactgccacttctcaccacgtgactggcagcgactcatcaacaacaactggggattccggcctaagcgactcaacttcaagctcttcaacattcaggtcaaagaggttacggacaacaatggagtcaagaccgtcgccaataaccttaccagcacggtccaggtcttcacggactcagactatcagctcccgtacgtgctcgggtcggctcacgagggctgcctcccgccgttcccagcggacgttttcatgattcctcagtacgggtatctgacgcttaatgatggaagccaggccgtgggtcgttcgtccttttactgcctggaatatttcccgtcgcaaatgctaagaacgggtaacaacttccagttcagctacgagtttgagaacgtacctttccatagcagctacgctcacagccaaagcctggaccgactaatgaatccactcatcgaccaatacttgtactatctctcaaagactattaacggttctggacagaatcaacaaacgctaaaattcagtgtggccggacccagcaacatggctgtccagggaagaaactacatacctggacccagctaccgacaacaacgtgtctcaaccactgtgactcaaaacaacaacagcgaatttgcttggcctggagcttcttcttgggctctcaatggacgtaatagcttgatgaatcctggacctgctatggccagccacaaagaaggagaggaccgtttctttcctttgtctggatctttaatttttggcaaacaaggaactggaagagacaacgtggatgcggacaaagtcatgataaccaacgaagaagaaattaaaactactaacccggtagcaacggagtcctatggacaagtggccacaaaccaccagagtgcccaagcacaggcgcagaccggctgggttcaaaaccaaggaatacttccgggtatggtttggcaggacagagatgtgtacctgcaaggacccatttgggccaaaattcctcacacggacggcaactttcacccttctccgctgatgggagggtttggaatgaagcacccgcctcctcagatcctcatcaaaaacacacctgtacctgcggatcctccaacggccttcaacaaggacaagctgaactctttcatcacccagtattctactggccaagtcagcgtggagatcgagtgggagctgcagaaggaaaacagcaagcgctggaacccggagatccagtacacttccaactattacaagtctaataatgttgaatttgctgttaatactgaaggtgtatatagtggaccccgccccattggcaccagatacctgactcgtaatctg

SEQ ID NO: 636 - DNA, 2208 bp, Artificial Sequence
  source: /note="Description of Artificial Sequence: Synthetic polynucleotide"
atggctgccgatggttatcttccagattggctcgaggacaaccttagtgaaggaattcgcgagtggtgggctttgaaacctggagcccctcaacccaaggcaaatcaacaacatcaagacaacgctcgaggtcttgtgcttccgggttacaaataccttggacccggcaacggactcgacaagggggagccggtcaacgcagcagacgcggcggccctcgagcacgacaaggcctacgaccagcagctcaaggccggagacaacccgtacctcaagtacaaccacgccgacgccgagttccaggagcggctcaaagaagatacgtcttttgggggcaacctcgggcgagcagtcttccaggccaaaaagaggcttcttgaacctcttggtctggttgaggaagcggctaagacggctcctggaaagaagaggcctgtagagcagtctcctcaggaaccggactcctccgcgggtattggcaaatcgggtgcacagcccgctaaaaagagactcaatttcggtcagactggcgacacagagtcagtcccagaccctcaaccaatcggagaacctcccgcagccccctcaggtgtgggatctcttacaatggcttcaggtggtggcgcaccagtggcagacaataacgaaggtgccgatggagtgggtagttcctcgggaaattggcattgcgattcccaatggctgggggacagagtcatcaccaccagcacccgaacctgggccctgcccacctacaacaatcacctctacaagcaaatctccaacagcacatctggaggatcttcaaatgacaacgcctacttcggctacagcaccccctgggggtattttgacttcaacagattccactgccacttctcaccacgtgactggcagcgactcatcaacaacaactggggattccggcctaagcgactcaacttcaagctcttcaacattcaggtcaaagaggttacggacaacaatggagtcaagaccatcgccaataaccttaccagcacggtccaggtcttcacggactcagactatcagctcccgtacgtgctcgggtcggctcacgagggctgcctcccgccgttcccagcggacgttttcatgattcctcagtacgggtatctgacgcttaatgatggaagccaggccgtgggtcgttcgtccttttactgcctggaatatttcccgtcgcaaatgctaagaacgggtaacaacttccagttcagctacgagtttgagaacgtacctttccatagcagctacgctcacagccaaagcctggaccgactaatgaatccactcatcgaccaatacttgtactatctctcaaagactattaacggttctggacagaatcaacaaacgctaaaattcagtgtggccggacccagcaacatggctgtccagggaagaaactacatacctggacccagctaccgacaacaacgtgtctcaaccactgtgactcaaaacaacaacagcgaatttgcttggcctggagcttcttcttgggctctcaatggacgtaatagcttgatgaatcctggacctgctatggccagccacaaagaaggagaggaccgtttctttcctttgtctggatctttaatttttggcaaacaaggaactggaagagacaacgtggatgcggacaaagtcatgataaccaacgaagaagaaattaaaactactaacccggtagcaacggagtcctatggacaagtggccacaaaccaccagagtgcccaagcacaggcgcagaccggctgggttcaaaaccaaggaatacttccgggtatggtttggcaggacagagatgtgtacctgcaaggacccatttgggccaaaattcctcacacggacggcaactttcacccttctccgctgatgggagggtttggaatgaagcacccgcctcctcagatcctcatcaaaaacacacctgtacctgcggatcctccaacggccttcaacaaggacaagctgaactctttcatcacccagtattctactggccaagtcagcgtggagatcgagtgggagctgcagaaggaaaacagcaagcgctggaacccggagatccagtacacttccaactattacaagtctaataatgttgaatttgctgttaatactgaaggtgtatatagtgaaccccgccccattggcaccagatacctgactcgtaatctg

SEQ ID NO: 637 - DNA, 2208 bp, Artificial Sequence
  source: /note="Description of Artificial Sequence: Synthetic polynucleotide"
atggctgccgatggttatcttccagattggctcgaggacaaccttagtgaaggaattcgcgagtggtgggctttgaaacctggagcccctcaacccaaggcaaatcaacaacgtcaagacaacgctcgaggtcttgtgcttccgggttacaaataccttggacccggcaacggactcgacaagggggagccggtcaacgcagcagacgcggcggccctcgagcacgacaaggcctacgaccagcagctcaaggccggaggcaacccgtgcctcaagtacaaccacgccgacgccgagttccaggagcggctcaaagaagatacgtcttttgggggcaacctcgggcgagcagtcttccaggccaaaaagaggcttcttgaacctcttggtctggttgaggaagcggctaagacggctcctggaaagaagaggcctgtagagcagtctcctcaggaaccggactcctccgcgggtattggcagatcgggtgcacagcccgctaaaaagagactcaatttcggtcagactggcgacacagagtcagtcccagaccctcaaccaatcggagaacctcccgcagccccctcaggtgtgggatctcttacaatggcttcaggtggtggcgcaccagtggcagacaataacgaaggtgccgatggagtgggtagttcctcgggaaattggcattgcgattcccaatggctgggggacagagtcatcaccaccagcacccgaacctgggccctgcccacctacaacaatcacctctacaagcaaatctccaacagcacatctggaggatcttcaaatgacaacgcctacttcggctacagcaccccctgggggtattttgacttcaacagattccactgccacttctcaccacgtgactggcagcgactcatcaacaacaactggggattccggcctaagcgactcaacttcaagctcttcaacattcaggtcaaagaggttacggacaacaatggagtcaaggccatcgccaataaccttaccagcacggtccaggtcttcacggactcagactatcagctcccgtacgtgctcgggtcggctcacgagggctgcctcccgccgttcccagcggacgttttcatgattcctcagtacgggtatctgacgcttaatgatggaagccaggccgtgggtcgttcgtccttttactgcctggaatatttcccgtcgcaaatgctaagaacgggtaacaacttccagttcagctacgagtttgagaacgtacctttccatagcagctacgctcacagccaaagcctggaccgactaatgaatccactcatcgaccaatacttgtactatctctcaaagactattgacggttctggacagaatcaacaaacgctaaaattcagtgtggccggacccagcaacatggctgtccagggaagaaactacatacctggacccagctaccgacaacaacgtgtctcaaccactgtgactcaaaacaacaacagcgaatttgcttggcctggagcttcttcttgggctctcaatggacgtaatagcttgatggatcctggacctgctatggccagccacaaagaaggagaggaccgtttctttcctttgtctggatctttaatttttggcaaacaaggaactggaagagacaacgtggatgcggacaaagtcatgataaccaacgaagaagaaattaaaactactaacccggtagcaacggagtcctatggacaagtggccacaaaccaccagagtgcccaagcacaggcgcagaccggctgggttcaaaaccaaggaatacttccgggtatggtttggcaggacagagatgtgtacctgcaaggacccatttgggccaaaattcctcacacgggcggcaactttcacccttctccgctgatgggagggtttggaatgaagcacccgcctcctcagatcctcatcaaaaacacacctgtacctgcggatcctccaacggccttcaacaaggacaagctgaactctttcatcacccagtattctactggccaagtcagcgtggagatcgagtgggagctgcagaaggaaaacagcaagcgctggaacccggagatccagtacacttccaactattacaagtctaataatgttgaatttgctgttaatactgaaggtgtatatagtgaaccccgccccattggcaccagatacctgactcgtaatctg

SEQ ID NO: 638 - DNA, 2208 bp, Artificial Sequence
  source: /note="Description of Artificial Sequence: Synthetic polynucleotide"
atggctgccgatggttatcttccagattggctcgaggacaaccttagtgaaggaattcgcgagtggtgggctttgaaacctggagcccctcaacccaaggcaaatcaacaacatcaagacaacgctcgaggtcttgtgcttccgggttacaaataccttggacccggcaacggactcgacaagggggagccggtcaacgcagcagacgcggcggccctcgagcacgacaaggcctacgaccagcagctcaaggccggagacaacccgtacctcaagtacaaccacgccgacgccgagttccaggagcggctcaaagaagatacgtcttttgggggcaacctcgggcgagcagtcttccaggccaaaaagaggcttcttgaacctcttggtctggttgaggaagcggctaagacggctcctggaaagaagaggcctgtagagcagtctcctcaggaaccggactcctccgcgggtattggcaaatcgggtgcacagcccgctaaaaagagactcaatttcggtcagactggcgacacagagtcagtcccagaccctcaaccaatcggagaacctcccgcagccccctcaggtgtgggatctcttacaatggcttcaggtggtggcgcaccagtggcagacaataacgaaggtgccgatggagtgggtagttcctcgggaaattggcattgcgattcccaatggctgggggacagagtcatcaccaccagcacccgaacctgggccctgcccacctacaacaatcacctctacaagcaaatctccaacagcacatctggaggatcttcaaatgacaacgcctacttcggctacagcaccccctgggggtattttgacttcaacagattccactgccacttctcaccacgtgactggcagcgactcatcaacaacaactggggattccggcctaagcgactcaacttcaagctcttcaacattcaggtcaaagaggttacggacaacaatggagtcaagaccatcgccaataaccttaccagcacggtccaggtcttcacggactcagactatcagctcccgtacgtgctcgggtcggctcacgagggctgcctcccgccgttcccagcggacgttttcatgattcctcagtacgggtatctgacgcttaatgatggaagccaggccgtgggtcgttcgtccttttactgcctggaatatttcccgtcgcaaatgctaagaacgggtaacaacttccagttcagctacgagtttgagaacgtacctttccatagcagctacgctcacagccaaagcctggaccgactaatgaatccactcatcgaccaatacttgtactatctctcaaagactattaacggttctggacagaatcaacaaacgctaaaattcagtgtggccggacccagcaacatggctgtccagggaagaaactacatacctggacccagctaccgacaacaacgtgtctcaaccactgtgactcaaaacaacaacagcgaatttgcttggcctggagcttcttcttgggctctcaatggacgtaatagcttgatgaatcctggacctgctatggccagccacaaagaaggagaggaccgtttctttcctttgtctggatctttaatttttggcaaacaaggaactggaagagacaacgtggatgcggacaaagtcatgataaccaacgaagaagaaattaaaactactaacccggtagcaacggagtcctatggacaagtggccacaaaccaccagagtgcccaagcacaggcgcagaccggctgggttcaaaaccaaggaatacttccgggtatggtttggcaggacagagatgtgtacctgcaaggacccatttgggccaaaattcctcacacggacggcaactttcacccttctccgctgatgggagggtttggaatgaagcacccgcctcctcagatcctcatcaaaaacacacctgtacctgcggatcctccaacggccttcaacaaggacaagctgaactctttcatcacccagtattctactggccaagtcagcgtggagatcgagtgggagctgcagaaggaaaacagcaagcgctggaacccggagatccagtacacttccaactattacaagcctaataatgttgaatttgctgttaatactgaaggtgtatatagtgaaccccgccccattggcaccagatacctgactcgtaatctg

SEQ ID NO: 639 - DNA, 2208 bp, Artificial Sequence
  source: /note="Description of Artificial Sequence: Synthetic polynucleotide"
atggctgccgatggttatcttccagattggctcgaggacaaccttagtgaaggaattcgcgagtggtgggctttgaaacctggagcccctcaacccaaggcaaatcaacaacatcaagacaacgctcgaggtcttgtgcttccgggttacaaataccttggacccggcaacggactcgacaagggggagccggtcaacgcagcagacgcggcggccctcgagcacaacaaggcctacgaccagcagctcaaggccggagacaacccgtacctcaagtgcaaccacgccgacgccgagttccaggagcggctcaaagaagatacgtcttttgggggcaacctcgggcgagcagtcttccaggccaaaaagaggcctcttgaacctcttggtctggttgaggaagcggctaagacggctcctggaaagaagaggcctgtagagcagtctcctcaggaaccggactcctccgcgggtattggcaaatcgggtgcacagcccgctaaaaagagactcaatttcggtcagactggcgacacagagtcagtcccagaccctcaaccaatcggagaacctcccgcagccccctcaggtgtgagatctcttacaatggcttcaggtggtggcgcaccagtggcagacaataacgaaggtgccgatggagtgggtagttcctcgggaaattggcattgcgattcccaatggctgggggacagagtcatcaccaccagcacccgaacctgggccctgcccacctacaacaatcacctctacaagcaaatctccaacagcacatctggaggatcttcaaatgacaacgcctacctcggctacagcaccccctgggggtattttgacttcaacagattccactgccacttctcaccacgtgactggcagcgactcatcaacaacaactggggattccggcctaagcgactcaacttcaagctcttcaacattcaggtcaaagaggttacggacaacaatggagtcaagaccatcgccaataaccttaccagcacggtccaggtcttcacggactcagactatcagctcccgtacgtgctcgggtcggctcacgagggctgcctcccgccgttcccagcggacgttttcatgattcctcagtacgggtatctgacgcttaatgatggaagccaggccgtgggtcgttcgtccttttactgcctggaatatttcccgtcgcaaatgctaagaacgggtaacaacttccagttcagctacgagtttgagaacgtacctttccatagcagctacgctcacagccaaagcctggaccgactaatgaatccactcatcgaccaatacttgtactatctctcaaagactattaacggttctggacagaatcaacaaacgctaaaattcagtgtggccggacccagcaacatggctgtccagggaagaaactacatacctggacccagctaccgacaacaacgtgtctcaaccactgtgactcaaaacaacaacagcgaatttgcttggcctggagcttcttcttgggctctcaatggacgtaatagcttgatgaatcctggacctactatggccagccacaaagaaggagaggaccgtttctttcctttgtctggatctttaatttttggcaaacaaggaactggaagagacaacgtggatgcggacaaagtcatgataaccaacgaagaagaaattaaaactactaacccggtagcaacggagtcctatggacaagtggccacaaaccaccagagtgcccaagcacaggcgcagaccggctgggttcaaaaccaaggaatacttccgggtatggtttggcaggacagagatgtgtacctgcaaggacccatttgggccaaaattcctcacacggacggcaactttcacccttctccgctgatgggagggtttggaatgaagcacccgcctcctcagatcctcatcaaaaacacacctgtacctgcggatcctccaacggccttcaacaaggacaagctgaactctttcatcacccagtattctactggccaagtcagcgtggagatcgagtgggagctgcagaaggaaaacagcaagcgctggaacccggagatccagtacacttccaactattacaagtctaataatgttgaatttgctgttaatactgaaggtgtatatagtgaaccccgccccattggcaccagatacctgactcgtaatctg

SEQ ID NO: 640 - DNA, 2208 bp, Artificial Sequence
  source: /note="Description of Artificial Sequence: Synthetic polynucleotide"
atggctgccgatggttatcttccagattggctcgaggacaaccttagtgaaggaattcgcgagtggtgggctttgaaacctggagcccctcaacccaaggcaaatcaacaacatcaagacaacgctcgaggtcttgtgcttccgggttacaaataccttggacccggcaacggactcgacaagggggagccggtcaacgcagcagacgcggcggccctcgtgcacgacaaggcctacgaccagcagctcaaggccggagacaacccgtacctcaagtgcaaccacgccgacgccgagttccaggagcggctcaaagaagatacgtcttttgggggcaacctcgggcgagcagtcttccaggccaaaaagaggcttcttgaacctcttggtctggttgaggaagcggctaagacggctcctggaaagaagaggcctgtagagcagtctcctcaggaaccggactcctccgcgggtattggcaaatcgggtgcacagcccgctaaaaagagactcaatttcggtcagactggcgacacagagtcagtcccagaccctcaaccaatcggagaacctcccgcagccccctcaggtgtgggatctcttacaatggcttcaggtggtggcgcaccagtggcagacaataacgaaggtgccgatggagtgggtagttcctcgggaaattggcattgcgattcccaatggctgggggacagagtcatcaccaccagcacccgaacctgggccctgcccacctacaacaatcacctctacaagcaaatctccaacagcacatctggaggatcttcaaatgacaacgcctacctcggctacagcaccccctgggggtattttgacttcaacagattccactgccacttctcaccacgtgactggcagcgactcatcaacaacaactggggattccggcctaagcgactcaacttcaagctcttcaacattcaggtcaaagaggttacggacaacaatggagtcaagaccatcgccaataaccttaccagcacggtccaggtcttcacggactcagactatcagctcccgtacgtgctcgggtcggctcacgagggctgcctcccgccgttcccagcggacgttttcacgattcctcagtacgggtatctgacgcttaatgatggaagccaggccgtgggtcgttcgtccttttactgcctggaatatttcccgtcgcaaatgctaagaacgggtaacaacttccagttcagctacgagtttgagaacgtacctttccatagcagctacgctcacagccaaagcctggaccgactaatgaatccactcatcgaccaatacttgtactatctctcaaagactattaacggttctggacagaatcaacaaacgctaaaattcagtgtggccggacccagcaacatggctgtccagggaagaaactacatacctggacccagctaccgacaacaacgtgtctcaaccactgtgactcaaaacaacaacagcgaatttgcttggcctggagcttcttcttgggctctcaatggacgtaatagcttgatgaatcctggacctgctatggccagccacaaagaaggagaggaccgtttctttcctttgtctggatctttaatttttggcaaacaaggaactggaagagacaacgtggatgcggacaaagtcatgataaccaacgaagaagaaattaaaactactaacccggtagcaacggagtcctatggacaagtggccacaaaccaccagagtgcccaagcacaggcgcagaccggctgggttcaaaaccaaggaatacttccgggtatggtttggcaggacagagatgtgtacctgcaaggacccatttgggccaaaattcctcacacggacggcaactttcacccttctccgctgatgggagggtttggaatgaagcacccgcctcctcagatcctcatcaaaaacacacctgtacctgcggatcctccaacggccttcaacaaggacaagctgaactctttcatcacccagtattctactggccaagtcagcgtggagatcgagtgggagctgcagaaggaaaacagcaagcgctggaacccggagatccagtacacttccaactattacaagtctaataatgttgaatttgctgttaatactgaaggtgtatatagtgaaccccgccccattgggccccgatacctgactcgtaatttt

SEQ ID NO: 641 - DNA, 2208 bp, Artificial Sequence
  source: /note="Description of Artificial Sequence: Synthetic polynucleotide"
atggctgccgatggttatcttccagattggctcgaggacaaccttagtgaaggaattcgcgagtggtgggctttgaaacctggagcccctcaacccaaggcaaatcaacaacatcaagacaacgctcgaggtcttgtgcttccgggttacaaataccttggacccggcaacggactcgacaagggggagccggtcaacgcagcagacgcggcggccctcgagcacaacaaggcctacgaccagcagctcaaggccggagacaacccgtacctcaagtgcaaccacgccgacgccgagttccaggagcggctcaaagaagatacgtcttttgggggcaacctcgggcgagcagtcttccaggccaaaaagaggcttcttgaacctcttggtctggttgaggaagcggctaagacggctcctggaaagaagaggcctgtagagcagtctcctcaggaaccggactcctccgcgggtattggcaaatcgggtgcacagcccgctaaaaagagactcaatttcggtcagactggcgacacagagtcagtcccagaccctcaaccaatcggagaacctcccgcagccccctcaggtgtgagatctcttacaatggcttcaggtggtggcgcaccagtggcagacaataacgaaggtgccgatggagtgggtagttcctcgggaaattggcattgcgattcccaatggctgggggacagagtcatcaccaccagcacccgaacctgggccctgcccacctacaacaatcacctctacaagcaaatctccaacagcacatctggaggatcttcaaatgacaacgcctacctcggctacagcaccccctgggggtattttgacttcaacagattccactgccacttctcaccacgtgactggcagcgactcatcaacaacaactggggattccggcctaagcgactcaacttcaagctcttcaacattcaggtcaaagaggttacggacaacaatggagtcaagaccatcgccaataaccttaccagcacggtccaggtcttcacggactcagactatcagctcccgtacgtgctcgggtcggctcacgagggctgcctcccgccgttcccagcggacgttttcatgattcctcagtacgggtatctgacgcttaatgatggaagccaggccgtgggtcgttcgtccttttactgcctggaatatttcccgtcgcaaatgctaagaacgggtaacaacttccagttcagctacgagtttgagaacgtacctttccatagcagctacgctcacagccaaagcctggaccgactaatgaatccactcatcgaccaatacttgtactatctctcaaagactattaacggttctggacagaatcaacaaacgctaaaattcagtgtggccggacccagcaacatggctgtccagggaagaaactacatacctggacccagctaccgacaacaacgtgtctcaaccactgtgactcaaaacaacaacagcgaatttgcttggcctggagcttcttcttgggctctcaatggacgtaatagcttgatgaatcctggacctgctatggccagccacaaagaaggagaggaccgtttctttcctttgtctggatctttaatttttggcaaacaaggaactggaagagacaacgtggatgcggacaaagtcatgataaccaacgaagaagaaattaaaactactaacccggtagcaacggagtcctatggacaagtggccacaaaccaccagagtgcccaagcacaggcgcagaccggctgggttcaaaaccaaggaatacttccgggtatggtttggcaggacagagatgtgtacctgcaaggacccatttgggccaaaattcctcacacggacggcaactttcacccttctccgctgatgggagggtttggaatgaagcacccgcctcctcagatcctcatcaaaaacacacctgtacctgcggatcctccaacggccttcaacaaggacaagctgaactctttcatcacccagtattctactggccaagtcagcgtggagatcgagtgggagctgcagaaggaaaacagcaagcgctggaacccggagatccagtacacttccaactattacaagtctaataatgttgaatttgctgttaatactgaaggtgtatatagtgaaccccgccccattggcaccagatacctgactcgtaatctg

SEQ ID NO: 642 - DNA, 2208 bp, Artificial Sequence
  source: /note="Description of Artificial Sequence: Synthetic polynucleotide"
atggctgccgatggttatcttccagattggctcgaggacaaccttagtgaaggaattcgcgagtggtgggctttgaaacctggagcccctcaacccaaggcaaatcaacaacatcaagacaacgctcgaggtcttgtgcttccgggttacaaataccttggacccggcaacggactcgacaagggggagccggtcaacgcagcagacgcggcggccctcgagcacgacaaggcctacgaccagcagctcaaggccggagacaacccgtacctcaagtgcaaccacgccgacgccgagttccaggagcggctcaaagaagatacgtcttttgggggcaacctcgggcgagcagtcttccaggccaaaaagaggcttcttgaacctcttggtctggttgaggaagcggctaagacggctcctggaaagaagaggcctgtagagcagtctcctcaggaaccggactcctccgcgggtattggcaaatcgggtgcacagcccgctaaaaagagactcaatttcggtcagactggcgacacagagtcagtcccagaccctcaaccaatcggagaacctcccgcagccccctcaggtgtgggatctcttacaatggcttcaggcggtggcgcaccagtggcagacaataacgaaggtgccgatggagtgggtagttcctcgggaaattggcattgcgattcccaatggctgggggacagagtcatcaccaccagcacccgaacctgggccctgcccacctacaacaatcacctctacaagcaaatctccaacagcacatctggaggatcttcaaatgacaacgcctacctcggctacagcaccccctgggggtattttgacttcaacagattccactgccacttctcaccacgtgactggcagcgactcatcaacaacaactggggattccggcctaagcgactcaacttcgagctcttcaacattcaggtcaaagaggttacggacaacaatggagtcaagaccatcgccaataaccttaccagcacggtccaggtcttcacggactcagactatcagctcccgtacgtgctcgggtcggctcacgagggctgcctcccgccgttcccagcggacgttttcatgattcctcagtacgggtatctgacgcttaatgatggaagccaggccgtgggtcgttcgtccttttactgcctggaatatttcccgtcgcaaatgctaagaacgggtaacaacttccagtccagctacgagtttgagaacgtacctttccatagcagctacgctcacagccaaagcctggaccgactaatgaatccactcatcgaccaatacttgtactatctctcaaagactattaacggttctggacagaatcaacaaacgctaaaattcagtgtggccggacccagcaacatggctgtccagggaagaaactacatacctggacccagctaccgacaacaacgtgcctcaaccactgtgactcaaaacaacaacagcgaatttgcttggcctggagcttcttcttgggctctcaatggacgtaatagcttgatgaatcctggacctgctatggccagccacaaagaaggggaggaccgtttctttcctttgtctggatctttaatttttggcaaacaaggaactggaagagacaacgtggatgcggacaaagtcatgataaccaacgaagaagaaattaaaactactaacccggtagcaacggagtcctatggacaagtggccacaaaccaccagagtgcccaagcacaggcgcagaccggctgggttcaaaaccaaggaatacttccgggtatggtttggcaggacagagatgtgtacctgcaaggacccatttgggccaaaattcctcacacggacggcaactttcacccttctccgctgatgggagggtttggaatgaagcacccgcctcctcagatcctcatcaaaaacacacctgtacctgcggatcctccaacggccttcaacaaggacaagctgaactctttcatcacccagtattctactggccaagtcagcgtggagatcgagtgggagctgcagaaggaaaacagcaagcgctggaacccggagatccagtacacttccaactattacaagtctaataatgttgaatttgctgttaatactgaaggtgtatatagtgaaccccgccccattggcaccagatacctgactcgtaatctg

SEQ ID NO: 643 - DNA, 2208 bp, Artificial Sequence
  source: /note="Description of Artificial Sequence: Synthetic polynucleotide"
atggctgccgatggttatcttccagattggctcgaggacaaccttagtgaaggaattcgcgagtggtgggctttgaaacctggagcccctcaacccaaggcaaatcaacaacatcaagacaacgctcgaggtcttgtgcttccgggttacaaataccttggacccggcaacggactcgacaagggggagccggtcaacgcagcagacgcggcggccctcgagcacgacaaggcctacgaccagcagctcaaggccggagacaacccgtacctcaagtgcaaccacgccgacgccgagttccaggagcggctcaaagaagatacgtcttttgggggcaacctcgggcgagcagtcttccaggccaaaaagaggcttcttgaacctcttggtctggttgaggaagcggctaagacggctcctggaaagaagaggcctgtagagcagtctcctcaggaaccggactcctccgcgggtattggcaaatcgggtgcacagcccgctaaaaagagactcaatttcggtcagactggcgacacagagtcagtcccagaccctcaaccaatcggagaacctcccgcagcccccccaggtgtgggatctcttacaatggcttcaggtggtggcgcaccagtggcggacaataacgaaggtgccgatggagtgggtagttcctcgggaaattggcattgcgattcccaatggctgggggacagagtcatcaccaccagcacccgaacctgggccctgcccacctacaacaatcacctctacaagcaaatctccaacagcacatctggaggatcttcaaatgacaacgcctacctcggctacagcaccccctgggggtattttgacttcaacagattccactgccacttctcaccacgtgactggcagcgactcatcaacaacaactggggattccggcctaagcgactcaacttcaagctcttcaacattcaggtcaaagaggttacggacaacaatggagtcaagaccatcgccaataaccttaccagcacggtccaggtcttcacggactcagactatcagctcccgtacgtgctcgggtcggctcacgagggctgcctcccgccgttcccagcggacgttttcatgattcctcagtacgggtatctgacgcttaatgatggaagccaggccgtgggtcgttcgtccttttactgcctggaatatttcccgtcgcaaatgctaagaacgggtaacaacttccagttcagctacgagtttgagaacgtacctttccatagcagctacgctcacagccaaagcctggaccgactaatgaatccactcatcgaccaatacttgtactatctctcaaagactattagcggttctggacagaatcaacaaacgctaaaattcagtgtggccggacccagcaacatggctgtccagggaagaaactacatacctggacccagctaccgacaacaacgtgtctcaaccactgtgactcaaaacaacagcagcgaatttgcttggcctggagcttcttcttgggctctcaatggacgtaatagcttgatgaatcctggacctgctatggccagccacaaagaaggagaggaccgtttctttcctttgtctggatctttaatttttggcaaacaaggaactggaagagacaacgtggatgcggacaaagtcatgataaccaacgaagaagaaattaaaactactaacccggtagcaacggagtcctatggacaagtggccacaaaccaccagagtgcccaagcacaggcgcagaccggctgggttcaaaaccaaggaatactttcgggtatggtttggcaggacagagatgtgtacctgcaaggacccatttgggccaaaattcctcacacggacggcaactttcacccttctccgctgatgggagggtttggaatgaagcacccgcctcctcagatcctcatcaaaaacacacctgtacctgcggatcctccaacggccttcaacaaggacaagctgaactctttcatcacccagtattctactggccaagtcagcgtggagatcgagtgggagctgcagaaggaaaacagcaagcgctggaacccggagatccagtacacttccaactattacaagtctaataatgttgaatttgctgttaatactgaaggtgtatatagtgaaccccgccccattggcaccagatacctgactcgtaatctg

SEQ ID NO: 644 - DNA, 2208 bp, Artificial Sequence
  source: /note="Description of Artificial Sequence: Synthetic polynucleotide"
atggctgccgatggttatcttccagattggctcgaggacaaccttagtgaaggaattcgcgagtggtgggctttgaaacctggagcccctcaacccaaggcaaatcaacaacatcaagacaacgctcgaggtcttgtgcttccgggttacaaataccttggacccggcaacggactcgacaagggggagccggtcaacgcagcagacgcggcggccctcgagcacgacaaggcctacgaccagcagctcaaggccggagacaacccgtacctcaagtgcaaccacgccgacgccgagttccaggagcggctcaaagaagatacgtcttttgggggcaacctcgggcgagcagtcttccaggccaaaaagaggcttcttgaacctcttggtctggttgaggaagcggctaagacggctcctggaaagaagaggcctgtagagcagtctcctcaggaaccggactcctccgcgggtattggcaaatcgggtgcacagcccgctaaaaagagactcaatttcggtcagactggcgacacagagtcagtcccagaccctcaaccaatcggagaacctcccgcagccccctcaggtgtgggatctcttacaatggcttcaggtggtggcgcaccagtggcagacaataacgaaggtgccgatggagtgggtagttcctcgggaaattggcattgcgattcccaatggctgggggacagagtcatcaccaccagcacccgaacctgggccctgcccacctacaacaatcacctctacaagcaaatctccaacagcacatctggaggatcttcaaatgacaacgcctacctcggctacagcaccccctgggggtattttgacttcaacagattccactgccacttctcaccacgtgactggcagcgactcatcaacaacaactggggattccggcctaagcgactcaacttcaagctcttcaacattcaggtcaaagaggttacggacaacaatggagtcaagaccatcgccaataaccttaccagcacggtccaggtcttcacggactcagactatcagctcccgtacgtgctcgggtcggctcacgagggctgcctcccgccgttcccagcggacgttttcatgattcctcagtacgggtatctgacgcttaatgatggaagccaggccgtgggtcgttcgtccttttactgcctggaatatttcccgtcgcaaatgctaagaacgggtaacaacttccagttcagctacgagtttgagaacgtacctttccatagcagctacgctcacagccaaagcctggaccgactaatgaatccactcatcgaccaatacttgtactatctctcaaagactattaacggttctggacagaatcaacaaacgctaaaattcagtgtggccggacccagcaacatggctgtccagggaagaaactacatacctggacccagctaccgacaacaacgtgtctcaaccactgtgactcaaaacaacaacagcgaatttgcttggcctggagcttcttcttgggctctcaatggacgtaatagcttgatgaatcctggacctgctatggccagccacaaagaaggagaggaccgtttctttcctttgtctggatctttaatttttggcaaacaaggaactggaagagacaacgtggatgcggacaaagtcatgataaccaacgaagaagaaattaaaactactaacccggtagcaacggagtcctatggacaagtggccacaaaccaccagagtgcccaagcacaggcgcagaccggctgggttcaaaaccaaggaatacttccgggtatggtttggcaggacagagatgtgtacctgcaaggacccatttgggccaaaattcctcacacggacggcaactttcacccttctccgctgatgggagggtttggaatgaagcacccgcctcctcagatcctcatcaaaaacacacctgtacctgcggatcctccaacggccttcaacaaggacaagctgaactctttcatcacccagtattctactggccaagtcagcgtggagatcgagtgggagctgcagaaggaaaacagcaagcgctggaacccggagatccagtacacttccaactattacaagtctaataatgttgaatttgctgttaatactgaaggtgtatatagtgaaccccgccccattggcaccagatacctgactcgtaatctg

SEQ ID NO: 645 - DNA, 2208 bp, Artificial Sequence; identical to SEQ ID NO: 644
  source: /note="Description of Artificial Sequence: Synthetic polynucleotide"

SEQ ID NO: 646 - DNA, 2208 bp, Artificial Sequence
  source: /note="Description of Artificial Sequence: Synthetic polynucleotide"
atggctgccgatggttatcttccagattggctcgaggacaaccttagtgaaggaattcgcgagtggtgggctttgaaacctggagcccctcaacccaaggcaaatcaacaacatcaagacaacgctcgaggtcttgtgcttccgggttacaaataccttggacccggcaacggactcgacaagggggagccggtcaacgcagcagacgcggcggccctcgagcacgacaaggcctacgaccagcagctcaaggccggagacaacccgtacctcaagtgcaaccacgccgacgccgagttccaggagcggctcaaagaagatacgtcttttgggggcaacctcgggcgagcagtcttccaggccaaaaagaggcttcttgaacctcttggtctggttgaggaagcggctaagacggctcctggaaagaagaggcctgtagagcagtctcctcaggaaccggactcctccgcgggtattggcaaatcgggtgcacagcccgctaaaaagagactcaatttcggtcagactggcgacacagagtcagtcccagaccctcaaccaatcggagaacctcccgcagccccctcaggtgtgggatctcttacaatggcttcaggtggtggcgcaccagtggcagacaataacgaaggtgccgatggagtgggtagttcctcgggaaattggcattgcgattcccaatggctgggggacagagtcatcaccaccagcacccgaacctgggccctgcccacctacaacaatcacctctacaagcaaatctccaacagcacatctggaggatcttcaaatgacaacgcctacctcgactacagcaccccctgggggtattttgacttcaacagattccactgccacttctcaccacgtgactggcagcggctcatcaacaacaactggggattccggcctaagcgactcaacttcaagctcttcaacattcaggtcaaagaggttacggacaacaatggagtcaagaccatcgccaataaccttaccagcacggtccaggtcttcacggactcagactatcagctcccgtacgtgctcgggtcggctcacgagggctgcctcccgccgttcccagcggacgttttcatgattcctcagtacgggtatctgacgcttaatgatggaagccaggccgtgggtcgttcgtccttttactgcctggaatatttcccgtcgcaaatgctaagaacgggtaacaacttccagttcagctacgagtttgagaacgtacctttccatagcagctacgctcacagccaaagcctggaccgactaatgaatccactcatcgaccaatacttgtactatctctcaaagactattaacggttctggacagaatcaacaaacgctaaaattcagtgtggccggacccagcaacatggctgtccagggaagaaactacatacctggacccagctaccgacaacaacgtgtctcaaccactgtgactcaaaacaacaacagcgaatttgcttggcctggagcttcttcttgggctctcaatggacgtaatagcttgatgaatcctggacctgctatggccagccacaaagaaggagaggaccgtttctttcctttgtctggatctttaatttttggcaaacaaggaactggaagagacaacgtggatgcggacaaagtcatgataaccaacgaagaagaaattaaaactactaacccggtagcaacggagtcctatggacaagtggccacaaaccaccagagtgcccaagcacaggcgcagaccggctgggttcaaaaccaaggaatacttccgggtatggtttggcagggcagagatgtgtacctgcaaggacccatttgggccaaaattcctcacacggacggcaactttcacccttctccgctgatgggagggtttggaatgaagcacccgcctcctcagatcctcatcaaaaacacacctgtacctgcggatcctccaacggccttcaacaaggacaagctgaactctttcatcacccagtattctactggccaagtcagcgtggagatcgagtgggagctgcagaaggaaaacagcaagcgctggaacccggagatccagtacacttccaactattacaagtctaataatgttgaatttgctgttaatactgaaggtgtatatagtgaaccccgccccattggcaccagatacctgactcgtaatctg

SEQ ID NO: 647 - DNA, 2208 bp, Artificial Sequence; identical to SEQ ID NO: 644
  source: /note="Description of Artificial Sequence: Synthetic polynucleotide"

SEQ ID NO: 648 - DNA, 2208 bp, Artificial Sequence
  source: /note="Description of Artificial Sequence: Synthetic polynucleotide"
atggctgccgatggttatcctccagattggctcgaggacaaccttagtgaaggaattcgcgagtggtgggctttgaaacctggagcccctcaacccaaggcaaatcaacaacatcaagacaacgctcgaggtcttgtgcttccgggttacaaataccttggacccggcaacggactcgacaagggggagccggtcaacgcagcagacgcggcggccctcgagcacgacaaggcctacgaccagcagctcaaggccggggacaacccgcacctcaagtacaaccacgccgacgccgagttccaggagcggctcaaagaagatacgtcttttgggggcaacctcgggcgagcagtcttccaggccaaaaagaggcttcttgaacctcttggtctggttgaggaagcggctaagacggctcctggaaagaagaggcccgtagagcagtctcctcaggaaccggactcctccgcgggtattggcaaatcgggtgcacagcccgctaagaagagactcaatttcggtcagactggcgacactgagtcagtcccagaccctcaaccaatcggagaacctcccgcagccccctcaggtgtgggatctcttacaatggcttcaggtggtggcgcaccagtggcagacaataacgaaggtgccgatggagtgggtagttcctcgggaaattggcattgcgattcccaatggctgggggacagagtcatcaccaccagcacccgaacctgggccctgcccacctacaacaatcacctctacaagcaaatctccaacagcacatctggaggatcttcaaatgacaacgcctacttcggctacagcaccccctgggggtattttgacttcaacagattccactgccacttctcaccacgtgactggcagcgactcatcaacaacaactggggattccggcctaagcgactcaacttcaagctcttcaacattcaggtcaaagaggttacggacaacaatggagtcaagaccatcgccaataaccttaccagcacggtccaggtcttcacggactcagactatcagctcccgtacgtgctcgggtcggctcacgagggctgcctcccgccgttcccagcggacgttttcatgattcctcagtacgggtatctgacgcttaatgatggaagccaggccgtgggtcgttcgtccttttactgcctggaatatttcccgtcgcaaatgctaagaacgggtaacaacttccagttcagctacgagtttgagaacgtacctttccatagcagctacgctcacagccaaagcctggaccgactaatgaatccactcatcgaccaatacttgtactatctctcaaagactattaacggttctggacagaatcaacaaacgctaaaattcagtgtggccggacccagcaacatggctgtccagggaagaaactacatacctggacccagctaccgacaacaacgtgtctcaaccactgtgactcaaaacaacaacagcgaatttgcttggcctggagcttcttcttgggctctcaatggacgtaatagcttgatgaatcctggacctgctatggccagccacaaagaaggagaggaccgtttctttcctttgtctggatctttaatttttggcaaacaaggaactggaagagacaacgtggatgcggacaaagtcatgataaccaacgaagaagaaattaaaactactaacccggtagcaacggagtcctatggacaagtggccacaaaccaccagagtgcccaagcacaggcgcagaccggctgggttcaaaaccaaggaatacttccgggtatggtttggcaggacagagatgtgtacctgcaaggacccatttgggccaaaattcctcacacggacggcaactttcacccttctccgctgatgggagggtttggagtgaagcacccgcctcctcagatcctcatcaaaaacacacctgtacctgcggatcctccaacggccttcaacaaggacaggctgaactctttcatcacccagtattctactggccaagtcagcgtggagatcgagtgggagctgcagaaggaaaacagcaagcgctggaacccggagatccagtacacttccaactattacaagtctaataatgttgaatttgctgttaatactgaaggtgtatatagtgaaccccgccccattggcaccagatacctgactcgtaatctg

SEQ ID NO: 649 - DNA, 2208 bp, Artificial Sequence
  source: /note="Description of Artificial Sequence: Synthetic polynucleotide"
atggctgccgatggttatcttccagattggctcgaggacaaccttagtgaaggaattcgcgagtggtgggctttgaaacctggagcccctcaacccaaggcaaatcaacaacatcaagacaacgctcgaggtcttgtgcttccgggttacaaataccttggacccggcaacggactcgacaagggggagccggtcaacgcagcagacgcggcggccctcgagcacgacaaggcctacgaccagcagctcaaggccggagacaacccgtacctcaagtacaaccacgccgacgccgagttccaggagcggctcaaagaagatacgtcttttgggggcaacctcgggcgagcagtcttccaggccaaaaagaggcttcttgaacctcttggtctggttgaggaagcggctaagacggctcctggaaagaagaggcctgtagagcagtctcctcaggaaccggactcctccgcgggtattggcaaatcgggtgcacagcccgctaaaaagagactcaatttcggtcagactggcgacacagagtcagtcccagaccctcaaccaatcggagaacctcccgcagccccctcaggtgtgggatctcttacaatggcttcaggtggtggcgcaccagtggcggacaataacgaaggtgccgatggagtgggtagttcctcgggaaattggcattgcgattcccaatggctgggggacagagtcatcaccaccagcacccgaacctgggccctgcccacctacaacaatcacctctacaagcaaatctccaacagcacatctggaggatcttcaaatgacaacgcctacttcggctacagcaccccctgggggtattttgacttcaacagattccactgccacttctcaccacgtgactggcagcgactcatcaacaacaactggggattccggcctaagcgactcaacttcaagctcttcaacattcaggtcaaagaggttacggacaacaatggagtcaagaccatcgccaataaccttaccagcacggtccaggtcttcacggactcagactatcagctcccgtacgtgctcgggtcggctcacgagggctgcctcccgccgttcccagcggacgttttcatgattcctcagtacgggtatctgacgcttaatgatggaagccaggccgtgggtcgttcgtccttttactgcctggaatatttcccgtcgcaaatgctaagaacgggtaacaacttccagttcagctacgagtttgagaacgtacctttccatagcagctacgctcacagccaaagcctggaccgactaatgaatccactcatcgaccaatacttgtactatctctcaaagactattaacggttctggacagaatcaacaaacgctaaaattcagtgtggccggacccagcaacatggctgtccagggaagaaactacatacctggacccagctaccgacaacaacgtgtctcaaccactgtgactcaaaacaacaacagcgaatttgcttggcctggagcttcttcttgggctctcaatggacgtaatagtttgatgaatcctggacctgctatggccagccacaaagaaggagaggaccgtttctttcctttgtctggatctttaatttttggcaaacaaggaactggaagagacaacgtggatgcggacaaagtcatgataaccaacgaagaagaaattaaaactactaacccggtagcaacggagtcctatggacaagtggccacaaaccaccagagtgcccaagcacaggcgcagaccggctgggttcaaaaccaaggaatacttccgggtatggtttggcaggacagagatgtgtacctgcaaggacccatttgggccaaaattcctcacacggacggcaactttcacccttctccgctgatgggagggtttggagtgaagcacccgcctcctcagatcctcatcaaaaacacacctgtacctgcggatcctccaacggccttcaacaaggacaagctgaactctttcatcacccagtattctactggccaagtcagcgtggagatcgagtgggagctgcagaaggaaaacagcaagcgctggaacccggagatccagtacacttccaactattacaagtctaataatgttgaatttgctgttaatactgaaggtgtatatagtgaaccccgccccattggcaccagatacctgactcgtaatctg

SEQ ID NO: 650 - DNA, 2208 bp, Artificial Sequence
  source: /note="Description of Artificial Sequence: Synthetic polynucleotide"
atggctgccgatggttatcttccagattggctcgaggacaaccttagtgaaggaattcgcgagtggtgggctttgaaacctggagcccctcaacccaaggcaaatcaacaacatcaagacaacgctcgaggtcttgtgcttccgggttacaaataccttggacccggcaacggactcgacaagggggagccggtcaacgcagcagacgcggcggccctcgagcacgacaaggcctacgaccagcagctcaaggccggagacaacccgtacctcaagtacaaccacgccgacgccgagttccaggagcggctcaaagaagatacgtcttttgggggcaacctcgggcgagcagtcttccaggccaaaaagaggcttcttgaacctcttggtctggttgaggaagcggctaagacggctcctggaaagaagaggcctgtagagcagtctcctcaggaaccggactcctccgcgggtattggcaaatcgggtgcacagcccgctaaaaagagactcaatttcggtcagactggcgacacagagtcagtcccagaccctcaaccaatcggagaacctcccgcagccccctcaggtgtgggatctcttacaatggcttcaggtggtggcgcaccagtggcagacaataacgaaggtgccgatggagtgggtagttcctcgggaaattggcattgcgattcccaatggctgggggacagagtcatcaccaccagcacccgaacctgggccctgcccacttacaacaatcacctctacaagcaaatctccaacagcacatctggaggatcttcaaatgacaacgcctacttcggctacagcaccccctgggggtattttgacttcaacagattccactgccacttctcaccacgtgactggcagcgactcaccaacaacaactggggattccggcctaagcgactcaacttcaagctcttcaacattcaggtcaaagaggttacggacaacaatggagtcaagaccatcgccaataaccttaccagcacggtccaggtcttcacggactcagactatcagctcccgtacgtgctcgggtcggctcacgagggctgcctcccgccgttcccagcggacgttttcatgattcctcagtacgggtatctgacgcttaatgatggaagccaggccgtgggtcgttcgtccttttactgcctggaatatatcccgtcgcaaatgctaagaacgggtaacaacttccagttcagctacgagtttgagaacgtacctttccatagcagctacgctcacagccaaagcctggaccgactaatgaatccactcatcgaccaatacttgtactatctctcaaagactattaacggttctggacagaatcaacaaacgctaaaattcagtgtggccggacccagcaacatggctgtccagggaagaaactacatacctggacccagctaccgacaacaacgtgtctcaaccactgtgactcaaaacaacaacagcgaatttgcttggcctggagcttcttcttgggctctcaatggacgtaatagcttgatgaatcctggacctgctatggccagccacaaagaaggagaggaccgtttctttcctttgtctggatctttaatttttggcaaacaaggaactggaagagacaacgtggatgcggacaaagtcatgataaccaacgaagaagaaattaaaactactaacccggtagcaacggagtcctatggacaagtggccacaaaccaccagagtgcccaagcacaggcgcagaccggctgggttcaaaaccaaggaatacttccgggtatggtttggcaggacagagatgtgtacctgcaaggacccatttgggccaaaattcctcacacggacggcaactttcacccttctccgctgatgggagggtttggagtgaagcacccgcctcctcagatcctcatcaaaaacacacctgtacctgcggatcctccaacggccttcaacaaggacaagctgaactctttcatcacccagtattctactggccaagtcagcgtggagatcgagtgggagctgcagaaggaaaacagcaagcgctggaacccggagatccagtacacttccaactattacaagtctaataatgttgaatttgctgttaatactgaaggtgtatatagtgaaccccgccccattggcaccagatacctgactcgtaatctg

SEQ ID NO: 651 - DNA, 2208 bp, Artificial Sequence
  source: /note="Description of Artificial Sequence: Synthetic polynucleotide"
atggctgccgatggttatcttccagattggctcgaggacaaccttagtgaaggaattcgcgagtggtgggctttgaaacctggagcccctcaacccaaggcaaatcaacaacatcaagacaacgctcgaggtcttgtgcttccgggttacaaataccttggacccggcaacggactcgacaagggggagccggtcaacgcagcagacgcggcggccctcgagcacgacaaggcctacgaccagcagctcaaggccggagacaacccgtacctcaagtacaaccacgccgacgccgagttccaggagcggctcaaagaagatacgtcttttgggggcaacctcgggcgagcagtcttccaggccaaaaagaggcttcttgaacctcttggtctggttgaggaagcggctaagacggctcctggaaagaagaggcctgtagagcagtctcctcaggaaccggactcctccgcgggtattggcaaatcgggtgcacagcccgctaaaaagagactcaatttcggtcagactggcgacacagagtcagtcccagaccctcaaccaatcggagaacctcccgcagccccctcaggtgtgggatctcttacaatggcttcaggtggtggcgcaccagtggcagacaataacgaaggtgccgatggagtgggtagttcctcgggaaattggcattgcgattcccaatggctgggggacagagtcatcaccaccagcacccgaacctgggccctgcccacctacaacaatcacctctacaagcaaatctccaacagcacatctggaggatcttcaaatgacaacgcctacttcggctacagcaccccctgggggtattttgacttcaacagattccactgccacttctcaccacgtgactggcagcgactcatcaacaacaactggggattccggcctaagcgactcaacttcaagctcttcaacattcaggtcaaagaggttacggacaacaatggagtcaagaccatcgccaataaccttaccagcacggtccaggtcttcacggactcagactatcagctcccgtacgtgctcgggtcggctcacgagggctgcctcccgccgttcccagcggacgttttcatgattcctcagtacgggtatctgacgcttaatgatggaagccaggccgtgggtcgttcgtccttttactgcctggaatatttcccgtcgcaaatgctaagaacgggtaacaacttccagtttagctacgagtttgagaacgtacctttccatagcagctacgctcacagccaaagcctggaccgactaatgaatccactcatcgaccaatacttgtactatctctcaaagactattaacggttctggacagaatcaacaaacgctaaaattcagtgtggccggacccagcaacatggctgtccagggaagaaactacatacctggacccagctaccgacaacaacgtgtctcaaccactgtgactcaaaacaacaacagcgaatttgcttggcctggagcttcttcttgggctctcaatggacgtaatagcttgatgaatcctggacctgctatggccagccacaaagaaggagaggaccgtttctttcctttgtctggatctttaatttctggcaaacaaggaactggaagagacaacgtggatgcgaacaaagtcatgataaccaacgaagaagaaattaaaactactaacccggtagcaacggagtcctatggacaagtggccacaaaccaccagagtgcccaagcacaggcgcagaccggctgggttcaaaaccaaggaatacttccgggtatggtttggcaggacagagatgtgtacctgcaaggacccatttgggccaaaattcctcacacggacggcaactttcacccttctccgctgatgggagggtttgaaatgaagcacccgcctcctcagatcctcatcaaaaacacacctgtacctgcggatcctccaacggccttcaacaaggacaagctgaactctttcatcacccagtattctactggccaagtcagcgtggagatcgagtgggagctgcagaaggaaaacagcaagcgctggaacccggagatccagtacacttccaactattacaagtctaataatgttgaatttgctgttaatactgaaggtgtatatagtgaaccccgccccattggcaccagatacctgactcgtaatctg

SEQ ID NO: 652 - DNA, 2208 bp, Artificial Sequence
  source: /note="Description of Artificial Sequence: Synthetic polynucleotide"
atggctgccgatggttatcttccagattggctcgaggacaaccttagtgaaggaattcgcgagtggtgggctttgaaacctggagcccctcaacccaaggcaaatcaacaacatcaagacaacgctcgaggtcttgtgcttccgggttacaaataccttggacccggcaacggactcgacaagggggagccggtcaacgcagcagacgcggcggccctcgagcacgacaaggcctacgaccagcagctcaaggccggagacaacccgtacctcaagtacaaccacgccgacgccgagttccaggagcggctcaaagaagatacgtcttttgggggcaacctcgggcgagcagtcttccaggccaaaaagaggcttcttgaacctcttggtctggttgaggaagcggctaagacggctcctggaaagaagaggcctgtagagcagtctcctcaggaaccggactcctccgcgggtattggcaaatcgggtgcacagcccgctaaaaagagactcaatttcggtcagactggcgacacagagtcagtcccagaccctcaaccaatcggagaacctcccgcagccccctcaggtgtgggatctcttacaatagcttcaggtggtggcgcaccagtggcagacaataacgaaggtgccgatggagtgggtagttcctcgggaaattggcattgcgattcccaatggctgggggacagagtcatcaccaccagcacccgaacctgggccctgcccacctacaacaatcacctctacaagcgaatctccaacagcacatctggaggatcttcaaatgacaacgcctacttcggctacagcaccccctgggggtattttgacttcaacagattccactgccacttctcaccacgtgactggcagcgactcatcaacaacaactggggattccggcctaagcgactcaacttcaagcttttcaacattcgggtcaaagaggttacggacaacaatggagtcaagaccatcaccaataaccttaccagcacggtccaggtcttcacggactcagactatcagctcccgtacgtgcttgggtcggctcacgagggctgcctcccgccgttcccagcggacgttttcatgattcctcagtacgggtatctgacgcttaatgatggaagccaggccgtgggtcgttcgtccttttactgcctggaatatttcccgtcgcaaatgctaagaacgggtaacaacttccagttcagctacgagtttgagaacgtacctttccatagcagctacgctcacagccaaagcctggaccgactaatgaatccactcatcgaccaatacttgtactatctctcaaagactattaacggttctggacagaatcaacaaacgctaaaattcagtgtggccggacccagcaacatggctgtccagggaagaaactacatacctggacccagctaccgacaacaacgtgtctcaaccactgtgactcgaaacaacaacagcgaatttgcttggcctggagcttcttcttgggctctcaatggacgtaatagcttgatgaatcctggacctgctatggccagccacaaagaaggagaggaccgtttctttcctttgtctggatctttaatttttggcaaacaaggaactggaagagacaacgtggatgcggacaaagtcatgataaccaacgaagaagaaattaaaactactaacccggtagcaacggagtcctatggacaagtggccacaaaccaccagagtgcccaagcacaggcgcagaccggctgggttcaaaaccaaggaatacttccgggtatggtttggcaggacagagatgtgtacctgcaaggacccatttgggccaaaattcctcacacggacggcaactttcacccttctccgctgatgggagggtttggagtgaagcacccgcctcctcagatcctcatcaaaaacacacctgtacctgcggatcctccaacggccttcaacaaggacaagctgaactctttcatcacccagtattctactggccaagtcagcgtggagatcgagtgggagctgcagaaggaaaacagcaagcgctggaacccggagatccagtacacttccaactattacaagtctaataatgttgaatttgctgttaatactgaaggtgtatatagtgaaccccgccccattggcaccagatacctgactcgtaatctg

SEQ ID NO: 653 - DNA, 2208 bp, Artificial Sequence
  source: /note="Description of Artificial Sequence: Synthetic polynucleotide"
atggctgccgatggttatcttccagattggctcgaggacaaccttagtgaaggaattcgcgagtggtgggctttgaaacctggagcccctcaacccaaggcaaatcaacaacatcaagacaacgctcgaggtcttgtgcttccgggttacaaataccttggacccggcaacggactcgacaagggggagccggtcaacgcagcagacgcggcggccctcgagcacgacaaggcctacgaccagcagctcaaggccggagacaacccgtacctcaagtacaaccacgccgacgccgagttccaggagcggctcaaagaagatacgtcttttgggggcaacctcgggcgagcagtcttccaggccaaaaagaggcttcttgaacctcttggtctggttgaggaagcggctaagacggctcctggaaagaagaggcctgtagagcagtctcctcaggaaccggactcctccgcgggtattggcaaatcgggcgcacagcccgctaaaaagagactcaatttcggtcagactggcgacacagagccagtcccagaccctcaaccaatcggagaacctcccgcagccccctcaggtgtgggatctcttacaatggcttcaggtggtggcgcaccagtggcagacaataacgaaggtgccgatggagtgggtagttcctcgggaaattggcattgcgattcccaatggctgggggacagagtcatcaccaccagcacccgaacctgggccctgcccacctacaacaatcacctctacaagcaaatctccaacagcacatctggaggatcttcaaatgacaacgcctacttcggctacagcaccccctgggggtattttgacttcaacagattccactgccacttctcaccacgtgactggcagcgactcatcaacaacaactggggattccggcctaagcgactcaacttcaagctcttcaacattcaggtcaaagaggttacggacaacaatggagtcaagaccatcgccaataaccttaccagcacggtccaggtcttcacggactcagactatcagctcccgtacgtgctcgggtcggctcacgagggctgcctcccgccgttcccagcgggcgttttcatgattcctcagtacgggtatctgacgcttaatgatggaagccaggccgtgggtcgttcgtccttttactgcctggaatatttcccgtcgcaaatgctaagaacgggtaacaacttccagttcagctacgagtttgagaacgtacctttccatagcagctacgctcacagccaaagcctggaccgactaatgaatccactcatcgaccaatacttgtactatctctcaaagactattaacggttctggacagaatcaacaaacgctaaaattcagtgtggccggacccagcaacatggctgtccagggaagaaactacatacctggacccagctaccgacaacaacgtgtctcaaccactgcgactcaaaacaacaacagcgaatttgcttggcctggagcttcttcttgggctctcaatggacgtaatagcttgatgaatcctggacctgctatggccagccacaaagaaggagaggaccgtttctttcctttgtctggatctttaatttttggcaaacaaggaactggaagagacaacgtggatgcggacaaagtcatgataaccaacgaagaagaaattaaaactactaacccggtagcaacggagtcctatggacaagtggccacaaaccaccagagtgcccaagcacaggcgcagaccggctgggttcaaaaccaaggaatacttccgggtatggtttggcaggacagagatgtgtacctgcaaggacccatttgggccaaaattcctcacacggacggcaactttcacccttctccgctgatgggagggtttggaatgaagcacccgcctcctcagatcctcatcaaaaacacacctgtacctgcggatcctccaacggccttcaacaaggacaagctgaactctttcatcacccagtattctactggccaagtcagcgtggagatcgagtgggagctgcagaaggaaaacagcaagcgctggaacccggagatccagtacacttccaactattacaagtctaataatgttgaatttgctgttaatactgaaggtgtatatagtgaaccccgccccattggcaccagatacctgactcgtaatctg

SEQ ID NO: 654 - DNA, 2208 bp, Artificial Sequence
  source: /note="Description of Artificial Sequence: Synthetic polynucleotide"
atggctgccgatggttatcttccagattggctcgaggacaaccttagtgaaggaattcgcgagtggtgggctttgaaacctggagcccctcaacccaaggcaaatcaacaacatcaagacaacgctcgaggtcttgtgcttccgggttacaaataccttggacccggcaacggactcgacaagggggagccggtcaacgcagcagacgcggcggccctcgagcacgacaaggcctacgaccagcagctcaaggccggagacaacccgtacctcaagtacaaccacgccgacgccgggttccaggagcggctcaaagaagatacgtcttttgggggcaacctcgggcgagcagtcttccaggccaaaaagaggcttcttgaacctcttggtctggttgaggaagcggctaagacggctcctggaaagaagaggcctgtagagcagtctcctcaggaaccggactcctccgcgggtattggcaaatcgggtgcacagcccgctaaaaagagactcaatttcggtcagactggcgacacagagtcagtcccagtccctcaaccaatcggagaacctcccgcagccccctcaggtgtgggatctcttacaatggcttcaggtggtggcgcaccagtggcagacaataacgaaggtgccgatggagtgggtagttcctcgggaaattggcattgcgattcccaatggctgggggacagagtcatcaccaccagcacccgaacctgggccctgcccacctacaacaatcacctctacaagcaaatctccaacagcacatctggaggatcttcaaatgacaacgcctacttcggctacagcaccccctgggggtattttgacttcaacagattccactgccacttctcaccacgtgactggcagcgactcatcaacaacaactggggattccggcctaagcgactcaacttcaagctcttcaacattcaggtcaaagaggttacggacaacaatggagtcaagaccatcgccaataaccttaccagcacggtccaggtcttcacggactcagactatcagctcccgtacgtgctcgggtcggctcacgagggctgcctcccgccgttcccagcggacgttttcatgattcctcagtacgggtatctgacgcttaatgatggaagccaggccgtgggtcgttcgtccttttactgcctggaatatttcccgtcgcaaatgctaagaacgggtaacaacttccagttcagctacgagtttgagaacgtacctttccatagcagctacgctcacagccaaagcctggaccgactaatgaatccactcatcgaccaatacttgtactatctctcaaagactattaacggttctggacagaatcaacaaacgctaaaattcagtgtggccggacccagcaacatggctgtccagggaagaaactacatacctggacccagctaccgacaacaacgtgtctcaaccactgtgactcaaaacaacaacagcgaatttgcttggcctggagcttcttcttgggctctcaatggacgtaatagcttgatgaatcctggacctgctatggccagccacaaagaaggagaggaccgtttctttcctttgtctggatctttaatttttggcaaacaaggagctggaagagacaacgtggatgcggacaaagtcatgataaccaacgaagaagaaattaaaactactaacccggtagcaacggagtcctatggacaagtggccacaaaccaccagagtgcccaagcacaggcgcagaccggctgggttcaaaaccaaggaatacttccgggtatggtttggcaggacagagatgtgtacctgcaaggacccatttgggccaaaattcctcacacggacggcaactttcacccttctccgctgatgggagggtttggaatgaagcacccgcctcctcagatcctcatcaaaaacacacctgtacctgcggatcctccaacggccttcaacaaggacaagctgaactctttcatcacccagtattctactggccaagtcagcgtggagatcgagtgggagctgcagaaggaaaacagcaagcgctggaacccggagatccagtacacttccaactattacaagtctaataatgttgaatttgctgttaatactgaaggtgtatatagtgaaccccgccccattggcaccagatacctgactcgtaatctg

SEQ ID NO: 655 - DNA, 2208 bp, Artificial Sequence
  source: /note="Description of Artificial Sequence: Synthetic polynucleotide"
  modified_base (377)..(377): a, c, t, or g
atggctgccgatggttatcttccagattggctcgaggacaaccttagtgaaggaattcgcgagaggtgggctttgaaacctggagcccctcaacccaaggcaaatcaacaacatcaagacaacgctcgaggtcttgtgcttccgggttacaaataccttggacccggcaacggactcgacaagggggagccggtcaacgcagcagacgcggcggccctcgagcacgacaaggcctacgaccagcagctcaaggccggagacaacccgtacctcaagtacaaccacgccgacgccgagttccaggagcggctcaaagaagatacgtcttttgggggcaacctcgggcgagcagtcttccaggccaaaaagaggcttcntgaacctcttggtctggttgaggaagcggctaagacggctcctggaaagaagaggcctgtagagcagtctcctcaggaaccggactcctccgcgggtattggcaaatcgggtgcacagcccgctaaaaagagactcaatttcggtcagactggcgacacagagtcagtcccagaccctcaaccaatcggagaacctcccgcagccccctcaggtgtgggatctcttacaatggcttcaggtggtggcgcaccagtggcagacaataacgaaggtgccgatggagtgggtagttcctcggggaattggcattgcgattcccaatggctgggggacagagtcatcaccaccagcacccgaacctgggccctgcccacctacaacaatcacctctacaagcaaatctccaacagcacatctggaggatcttcaaatgacaacgcctacttcggctacagcaccccctgggggtattttgacttcaacagattccactgccacttctcaccacgtgactggcagcgactcatcaacaacaactggggattccggcctaagcgactcaacttcaagctcttcaacattcaggtcaaagaggttacggacaacaatggagtcaagaccatcgccaataaccttaccagcacggtccaggtcttcacggactcagactatcagctcccgtacgtgctcgggtcggctcacgagggctgcctcccgccgttcccagcggacgttttcatgattcctcagtacgggtatctgacgcttaatgatggaagccaggccgtgggtcgttcgtccttttactgcctggaatatttcccgtcgcaaatgctaagaacgggtaacaacttccagttcagctacgagtttgagaacgtacctttccatagcagctacgctcacagccaaagcccggaccgactaatgaatccactcatcgaccaatacttgtactatctctcaaagactattaacggttctggacagaatcaacaaacgctaaaattcagtgtggccggacccagcaacatggctgtccagggaagaaactacatacctggacccagctaccgacaacaacgtgtctcaaccactgtgactcaaaacaacaacagcgaatttgcttggcctggagcttcttcttgggctctcaatggacgtaatagcttgatgaatcctggacctgctatggccagccacaaagaaggagaggaccgtttctttcctttgtctggatctttaatttttggcaaacaaggaactggaagagacaacgtggatgcggacaaagtcatgataaccaacgaagaagaaattaaaactactaacccggtagcaacggagtcctatggacaagtggccacaaaccaccagagtgcccaagcacaggcgcagaccggctgggttcaaaaccaaggaatacttccgggtatggtttggcaggacagagatgtgtacctgcaaggacccatttgggccaaaattcctcacacggacggcaactttcacccttctccgctgatgggagggtttggagtgaagcacccgcctcctcagatcctcatcaaaaacacacctgtacctgcggatcctccaacggccttcaacaaggacaagctgaactctttcatcacccagtattctactggccaagtcagcgtggagatcgagtgggagctgcagaaggaaaacagcaagcgctggaacccggagatccagtacacttccaactattacaagtctaataatgttgaatttgctgttaatactgaaggtgtatatagtgaaccccgccccattggcaccagatacctgactcgtaatctg

SEQ ID NO: 656 - DNA, 2208 bp, Artificial Sequence
  source: /note="Description of Artificial Sequence: Synthetic polynucleotide"
atggctgccgatggttatcttccagattggctcgaggacaaccttagtgaaggaattcgcgagtggtgggctttgaaacctggagcccctcaacccaaggcaaatcaacaacatcaagacaacgctcgaggtcttgtgcttccgggttacaaataccttggacccggcaacggactcgacaagggggagccggtcaacgcagcagacgcggcggccctcgagcacgacaaggcctacgaccagcagctcaaggccggagacaacccgtacctcaagtacaaccacgccgacgccgagttccaggagcggctcaaagaagatacgtcttttgggggcaacctcgggcgagcagtcttccaggccaaaaagaggcttcttgaacctcttggtctggttgaggaagcggctaagacggctcctggaaagaagaggcctgtagagcagtctcctcaggaaccggactcctccgcgggtattggcaaatcgggtgcacagcccgctaaaaagagactcaatttcggtcagactggcgacacagagtcagtcccagaccctcaaccaatcggagaacctcccgcagccccctcaggtgtgggatctcttacaatggcttcaggtggtggcgcaccagtggcagacaataacgaaggtgccgatggagtgggtagttcctcgggaaattggcattgcgattcccaatggctgggggacagagtcatcaccaccagcacccgaacctgggccctgcccacctacaacaatcacctctacaagcaaatctccaacagcacatctggaggatcttcaaatgacaacgcctacctcggctacagcaccccctgggggtattttgacttcaacagattccactgccacttctcaccacgtgactggcagcgactcatcaacaacaactggggattccggcctaagcgactcaacttcaagctcttcaacattcaggtcaaagaggttacggacaacaatggagtcaagaccatcgccaataaccttaccagcacggtccaggtcttcacggactcagactatcagctcccgtacgtgctcgggtcggctcacgagggctgcctcccgccgttcccagcggacgttttcatgattcctcagtacgggtatctgacgcttaatgatggaagccaggccgtgggtcgttcgtccttttactgcctggaatatttcccgtcgcaaatgctaagaacgggtaacaacttccagttcagctacgagtttgagaacgtacctttccatagcagctacgctcacagccaaagcctggaccgactaatgaatccactcatcgaccaatacttgtactatctctcaaagactattaacggttctggacagaatcaacaaacgctaaaattcagtgtggccggacccagcaacatggctgtccagggaagaaactacatacctggacccagctaccgacaacaacgtgtctcaaccactgtgactcaaaacaacaacagcgaatttgcttggcctggagcttcttcttgggctctcaatggacgtaatagcttgatgaatcctggacctgctatggccagccacaaagaaggagaggaccgtttctttcctttgtctggatctttaatttttggcaaacaaggaactggaagagacaacgtggatgcggacaaagtcatgataaccaacgaagaagaaattaaaactactaacccggtagcaacggagtcctatggacaagtggccacaaaccaccagagtgcccaagcacaggcgcagaccggctgggttcaaaaccaaggaatacttccgggtatggtttggcaggacagagatgtgtacctgcaaggacccatttgggccaaaattcctcacacggacggcaactttcacccttctccgctgatgggagggtttggaatgaagcacccgcctcctcagatcctcatcaaaaacacacctgtacctgcggatcctccaacggccttcaacaaggacaagctgaactctttcatcacccagtattctactggccaagtcagcgtggagatcgagtgggagctgcagaaggaaaacagcaagcgctggaacccggagatccagtacacttccaactattacaagtctaataatgttgaatttgctgttaatactgaaggtgtatatagtgaaccccgccccattggcaccagatacctgactcgtaatctg

SEQ ID NO: 657 - DNA, 2208 bp, Artificial Sequence
  source: /note="Description of Artificial Sequence: Synthetic polynucleotide"
atggctgccgatggttatcttccagattggctcgaggacaaccttagtgaaggaattcgcgagtggtgggctttgaaacctggagcccctcaacccaaggcaaatcaacaacatcaagacaacgctcgaggtcttgtgcttccgggttacaaataccttggacccggcaacggactcgacaagggggagccggtcaacgcagcagacgcggcggccctcgagcacgacaaggcctacgaccagcagctcaaggccggagacaacccgtacctcaagtacaaccacgccgacgccgagttccaggagcggctcaaagaagatacgtcttttgggggcaacctcgggcgagcagtcttccaggccaaaaagaggcttcttgaacctcttggtctggttgaggaagcggctaagacggctcctggaaagaagaggcctgtagagcagtctcctcaggaaccggactcctccgcgggtattggcaaatcgggtgcacagcccgctaaaaagagactcaatttcggtcagactggcgacacagagtcagtcccagaccctcaaccaatcggagaacctcccgcagccccctcaggtgtgggatctcttacaatggcttcaggtggtggcgcaccagtggcagacaataacgaaggtgccgatggagtgggtagttcctcgggaaattggcattgcgattcccaatggctgggggacagagtcatcaccaccagcacccgaacctgggccctgcccacctacaacaatcacctctacaagcaaatctccaacagcacatctggaggatcttcaaatgacaacgcctacttcggctacagcaccccctgggggtattttgacttcaacagattccactgccacttctcaccacgtgactggcagcgactcatcaacaacaactggggattccggcctaagcgactcaacttcaagctcttcaacattcaggtcaaagaggttacggacaacaatggagtcaagaccatcgccaataaccttaccagcacggtccaggtcttcacggactcagactatcagctcccgtacgtgctcgggtcggctcacgagggctgcctcccgccgttcccagcggacgttttcatgattcctcagtacgggtatctgacgcttaatgatggaagccaggccgtgggtcgttcgtccttttactgcctggaatatttcccgtcgcaaatgctaagaacgggtaacaacttccagttcagctacgagtttgagaacgtacctttccatagcagctacgctcacagccagagcctggaccgactaatgaatccactcatcgaccaatacttgtactatctctcaaagactattaacggttctggacagaatcaacaaacgctaaaattcagtgtggccggacccagcaacatggctgtccagggaagaaactacatacctggacccagctaccgacaacaacgtgtctcaaccactgtgactcaaaacaacaacagcgaatttgcttggcctggagcttcttcttgggctctcaatggacgtaatagcttgatgaatcctggacctgctatggccagccacaaagaaggagaggaccgtttctttcctttgtctggatctttaatttttggcaaacaaggaactggaagagacaacgtggatgcggacaaagtcatgataaccaacgaagaagaaattaaaactactaacccggtagcaacggagtcctatggacaagtggccacaaaccaccagagtgcccaagcacaggcgcagaccggctgggttcaaaaccaaggaatacttccgggtatggtttggcaggacagagatgtgtacctgcaaggacccatttgggccaaaattcctcacacggacggcaactttcacccttctccgctgatgggagggtttggaatgaagcacccgcctcctcagatcctcatcaaaaacacacctgtacctgcggatcctccaacggccttcaacaaggacaagctggactctttcatcacccagtattctactggccaagtcagcgtggagatcgagtgggagctgcagaaggaaaacagcaagcgctggaacccggtgatccagtacacttccaactattacaagtctaataatgttgaatttgctgttaatactgaaggtgtatatagtgaaccccgccccattggcaccagatacctgactcgtaatctg

SEQ ID NO: 658 - DNA, 2208 bp, Artificial Sequence
  source: /note="Description of Artificial Sequence: Synthetic polynucleotide"
atggctgccgatggttatcttccagattggctcgaggacaacctctctgagggcattcgcgagtggtgggacttgaaacctggagccccgaagcccaaagccaaccagcaaaagcaggacgacggccggggtctggtgcttcctggctacaagtacctcggacccttcaacggactcgacaagggggagcccgtcaacgcggcggacgcagcggccctcgagcacgacaaggcctacgaccagcagctcaaagcgggtgacaatccgtacctgcggtataaccacgccgacgccgagtttcaggagcgtctgcaagaagatacgtcttttgggggcaacctcgggcgagcagtcttccaggccaagaagcgggttctcgaacctctcggtctggttgaggaaggcgctaagacggctcctggaaagaaacgtccggtagagcagtcgccacaagagccagactcctcctcgggcatcggcaagacaggccagcagcccgctaaaaagagactcaattttggtcagactggcgactcagagtcagtccccgatccacaacctctcggagaacctccagcaacccccgctgctgtggggcctactacaatggcttcaggcggtggcgcaccaatggcagacaataacgaaggcgtcgacggagtgggtaatgcctcaggaaattggcattgcgattccacatggctgggcgacagagtcatcaccaccagcacccgcacctgggccttgcccacctacaataaccacctctacaagcaaatctccagtgcttcaacgggggccagcaacgacaaccactacttcggctacagcaccccctgggggtattttgatttcaacagattccactgccacttttcaccacgtgactggcagcgactcatcaacaacaattggggattccggcccaagagactcaacttcaaactcttcaacatccaagtcaaggaggtcacgacgaatgatggcgttacaaccatcgctaataaccttaccagcacggttcaagtcttctcggactcggagtaccagcttccgtacgtcctcggctctgcgcaccagggctgcctccctccgttcccggcggacgtgttcatgattccgcaatacggctacctgacgctcaacaatggcagccaagccgtgggacgttcatccttttactgcctggaatatttcccttctcagatgctgagaacgggcaacaactttaccttcagctacacctttgaggaagtgcctttccacagcagctacgcgcacagccagagcctggaccggctgatgaatcctctcatcgaccaatacctgtattacctgaacagaactcaaaatcagtccggaagtgcccaaaacaaggacttgctgtttagccgtgggtctccagctggcatgtctgttcagcccaaaaactggctacctggaccctgttatcggcagcagcgcgtttctaaaacaaaaacagacaacaacaacagcaattttacctggactggtgcttcaaaatataacctcaatgggcgtgaatccatcatcaaccctggcactgctatggcctcacacaaagacgacgaagacaagttctttcccatgagcggtgtcatgatttttggaaaagagagcgccggagcttcaaacactgcattggacaatgtcatgattacagacgaagaggaaattaaagccactaaccctgtggccaccgaaagatttgggaccgtggcagtcaatttccagagcagcagcacagaccctgcgaccggagatgtgcatgctatgggagcattacctggcatggtgtggcaagatagagacgtgtacctgcagggtcccatttgggccaaaattcctcacacagatggacactttcacccgtctcctcttatgggcggctttggactcaagaacccgcctcctcagatcctcatcaaaaacacgcctgttcctgcgaatcctccggcggagttttcagccacaaagcttgcttcattcatcacccaatactccacaggacaagtgagtgtggaaattgaatgggagctgcagaaagaaaacagcaagcgctggaatcccgaagtgcagtacacatccaattatgcaaaatctgccaacgttgattttactgtggacaacaatggactttatactgagcctcgccccattggcacccgttaccttacccgtcccctg

SEQ ID NO: 659 - DNA, 2208 bp, Artificial Sequence
  source: /note="Description of Artificial Sequence: Synthetic polynucleotide"
atggctgccgatggttatcttccagattggctcgaggacaacctctctgagggcattcgcgagtggtgggacttgaaacctggagccccgaagcccaaagccaaccagcaaaagcaggacgacggccggggtctggtgcttcctggctacaagtacctcggacccttcaacggactcgacaagggggagcccgtcaacgcggcggacgcagcggccctcgagcacgacaaggcctacgaccagcagctcaaagcgggtgacaatccgtacctgcggtataaccacgccgacgccgagtttcaggagcgtctgcaagaagatacgtcttttgggggcaacctcgggcgagcagtcttccaggccaagaagcgggttctcgaacctctcggtctggttgaggaaggcgctaagacggctcctggaaagagacgtccggtagagcagtcgccacaagagccagactcctcctcgggcatcggcaagacaggccagcagcccgctaaaaagagactcaattttggtcagactggcgactcagagtcagtccccgatccacaacctctcggagaacctccagcaacccccgctgctgtgggacctactacaatggcttcaggcggtggcgcaccaatggcagacaataacgaaggcgccgacggagtgggtaatgcctcaggaaattggcattgcgattccacatggctgggcgacagagtcatcaccaccagcacccgcacctgggccttgcccacctacaataaccacctctacaagcaaatctccagtgcttcaacgggggccagcaacgacaaccactacttcggctacagcaccccctgggggtattttgatttcaacagattccactgccacttttcaccacgtgactggcagcgactcatcaacaacaattggggattccggcccaagagactcaacttcaaactcttcaacatccaagtcaaggaggtcacgacgaatgatggcgtcacaaccatcgctaataaccttaccagcacggttcaagtcttctcggactcggagtaccagcttccgtacgtcctcggctctgcgcaccagggctgcctccctccgttcccggcggacgtgttcatgattccgcaatacggctacctgacgctcaacaatggcagccaagccgtgggacgttcatccttttactgcctggaatatttcccttctcagatgctgagaacgggcaacaactttaccttcagctacacctttgaggaagtgcctttccacagcagctacgcgcacagccagagcctggaccggctgatgaatcctctcatcgaccaatacctgtattacctgaacagaactcaaaatcagtccggaagtgcccaaaacaaggacttgctgtttagccgtgggtctccagctggcatgtctgttcagcccaaaaactggctacctggaccctgttatcggcagcagcgcgtttctaaaacaaaaacagacaacaacaacagcaattttacctggactggtgcttcaaaatataacctcaatgggcgtgaatccatcatcaaccctggcactgctatggcctcacacaaagacgacgaagacaagttctttcccatgagcggtgtcatgatttttggaaaagagagcgccggagcttcaaacactgcattggacaatgtcatgattacagacgaagaggaaattaaagccactaaccctgtggccaccgaaagatttgggaccgtggcagtcaatttccagagcagcagcacagaccctgcgaccggagatgtgcatgctatgggagcattacctggcatggtgtggcaagatagagacgtgtacctgcagggtcccatttgggccaaaattcctcacacagatggacactttcacccgtctcctcttatgggcggctttggactcaagaacccgcctcctcagatcctcatcaaaaacacgcctgttcctgcgaatcctccggcggagttttcagctacaaagtttgcttcgttcatcacccaatactccacaggacaagtgagtgtggaaattgaatgggagctgcagaaagaaaacagcaagcgctggaatcccgaagtgcagtacacatccaattatgcaaaatctgccaacgttgattttactgtggacaacaatggactttatactgagcctcgccccattggcacccgttaccttacccgtcccctg

SEQ ID NO: 660 - DNA, 2208 bp, Artificial Sequence
  source: /note="Description of Artificial Sequence: Synthetic polynucleotide"
atggctgccgatggttatcttccagattggctcgaggacaacctctctgagggcattcgcgagtggtgggacttgaaacctggagccccgaagcccaaagccaaccagcaaaagcaggacgacggccggggtctggtgcttcctggctacaagtacctcggacccttcaacggactcgacaagggggagcccgtcaacgcggcggacgcagcggccctcgagcacgacaaggcctacgaccagcagctcaaagcgggtgacaatccgtacccgcggtataaccacgccgacgccgagtttcaggagcgtctgcaagaagatacgtcttttgggggcaacctcgggcgagcagtcttccaggccaagaagcgggttctcgaacctctcggtctggttggggaaggcgctaagacggctcctggaaagaaacgtccggtagagcagtcgccacaagagccagactcctcctcgggcatcggcaagacaggccagcagcccgctaaaaagagactcaattttggtcagactggcgactcagagtcagtccccgatccacaacctctcggagaacctccagcaacccccgctgctgtgggacctactacaatggcttcaggcggtggcgcaccaatggcagacaataacgaaggcgccgacggagtgggtaatgcctcaggaaattggcattgcgattccacatggctgggcgacagagtcatcaccaccagcacccgcacctgggccttgcccacctacaataaccacctctacaagcaaatctccagtgcttcaacgggggccagcaacgacaaccactacttcggctacagcaccccctgggggtattttgatttcaacagattccactgccacttttcaccacgtgactggcagcgactcatcaacaacaattggggattccggcccaagagactcaacttcaaactcttcaacatccaagtcaaggaggtcacgacgaatgatggcgtcacaaccatcgctaataaccttaccagcacggttcaagtcttctcggactcggagtaccagcttccgtacgtcctcggctctgcgcaccagggctgcctccctccgttcccggcggacgtgttcatgattccgcaatacggctacctgacgctcaacaatggcagccaagccgtgggacgttcatccttttactgcctggaatatttcccttctcagatgctgagaacgggcaacaactttaccttcagctacacctttgaggaagtgcctttccacagcagctacgcgcacagccagagcctggaccggctgatgaatcctcccatcgaccaatacctgtattacctgaacagaactcaaaatcagtccggaagtgcccaaaacaaggacttgctgtttagccgtgggtctccagctggcatgtctgttcagcccaaaaactggctacctggaccctgttatcggcagcagcgcgtttctaaaacaaaaacagacaacaacaacagcaattttacctggactggtgcttcaaaatataacctcaatgggcgtgaatccatcatcaaccctggcactgctatggcctcacacaaagacgacgaagacaagttctttcccatgagcggtgtcatgatttttggaaaagagagcgccggagcttcaaacactgcattggacaatgtcatgattacagacgaagaggaaattaaagccactaaccctgtggccaccgaaagatttgggaccgtggcagtcaatttccagagcagcagcacagaccctgcgaccggagatgtgcatgctatgggagcattacctggcatggtgtggcaagatagagacgtgtacctgcagggtcccatttgggccaaaattcctcacacagatggacactttcacccgtctcctcttatgggcggctttggactcaagaacccgcctcctcagatcctcatcaaaaacacgcctgttcctgcgaatcctccggcggagttttcagctacaaagtttgcttcattcatcacccaatactccacaggacaagtgagtgtggaaattgaatgggagctgcagaaagaaaacagcaagcgctggaatcccgaagtgcagtacacatccaattatgcaaaatctgccaacgttgattttactgtggacaacaatggactttatactgagcctcgccccattggcacccgttaccttacccgtcccctg

SEQ ID NO: 661 - DNA, 2208 bp, Artificial Sequence
  source: /note="Description of Artificial Sequence: Synthetic polynucleotide"
atggctgccgatggttatcttccagattggctcgaggacaacctctctgagggcattcgcgagtggtgggacttgaaacctggagccccgaagcccaaagccaaccagcaaaagcaggacgacggccggggtctggtgcttcctggctacaagtacctcggacccttcaacggactcgacaagggggagcccgtcaacgcggcggacgcagcggccctcgagcacgacaaggcctacgaccagcagctcaaagcgggtgacaatccgtacctgcggtataaccacgccgacgccgagtttcaggagcgtctgcaagaagatacgtcttttgggggcaacctcgggcgagcagtcttccaggccaagaagcgggttctcgaacctctcggtctggttgaggaaggcgctaagacggctcctggaaagaaacgtccggtagagcagtcgccacaagagccagactcctcctcgggcatcggcaagacaggccagcagcccgctaaaaagagactcaattttggtcagactggcgactcagagtcagtccccgatccacgacctctcggagaacctccagcaacccccgctgctgtgggacctactacaatggcttcaggcggtggcgcaccaatggcagacaataacgaaggcgccgacggagtgggtaatgcctcaggaaattggcattgcgattccacatggctgggcgacagagtcatcaccaccagcacccgcacctgggccttgcccacctacaataaccacctctacaagcaaatctccagtgcttcaacgggggccagcaacgacaaccactacttcggctacagcaccccctgggggtattttgatttcaacagattccactgccacttttcaccacgcgactggcagcgactcatcaacaacaattggggattccggcccaagagactcaacttcaaactcttcaacatccaagtcaaggaggtcacgacgaatgatggcgtcacaaccatcgctaataaccttaccagcacggttcaagtcttctcggactcggagtaccagcttccgtacgtcctcggctctgcgcaccagggctgcctccctccgttcccggcggacgtgttcatgattccgcaatacggctacctgacgctcaacaatggcagccaagccgtgggacgttcatccttttactgcctggaatatttcccttctcagatgctgagaacgggcaacaactttaccttcagctacacctttgaggaagtgcctttccacagcagctacgcgcacagccagagcctggaccggctgatgaatcctctcatcgaccaatacctgtattacctgaacagaactcaaaatcagtccggaagtgcccaaaacaaggacttgctgtttagccgtgggcctccagctggcatgtctgttcagcccaaaaactggctacctggaccctgttatcggcagcagcgcgtttctaaaacaaaaacagacaacaacaacagcaattttacctggactggtgcttcaaaatataacctcaatgggcgtgaatccatcatcaaccctggcactgctatggcctcacacaaagacgacgaagacaagttctttcccatgagcggtgtcatgatttttggaaaagagagcgccggagcttcaaacactgcattggacaatgtcatgattacggacgaagaggaaattaaagccactaaccctgtggccaccgaaagatttgggaccgtggcagtcaatttccagagcagcagcacagaccctgcgaccggagatgtgcatgctatgggagcattacctggcatggtgtggcaagatagagacgtgtacctgcagggtcccatttgggccaaaattcctcacacagatggacactttcacccgtctcctcttatgggcggctttggactcaagaacccgcctcctcagatcctcatcaaaaacacgcctgttcctgcgaatcctccggcggagttttcagctacaaagtttgcttcattcatcacccaatactccacaggacaagtgagtgtggaaattgaatgggagctgcagaaagaaaacagcaagcgctggaatcccgaagtgcagtacacatccaattatgcaaaatctgccaacgttgattttactgtggacaacaatggactttatactgagcctcgccccattggcacccgttaccttacccgtcccctg

SEQ ID NO: 662 - DNA, 2208 bp, Artificial Sequence
  source: /note="Description of Artificial Sequence: Synthetic polynucleotide"
atggctgccgatggttatcttccagattggctcgaggacaacctctctgagggcattcgcgagtggtgggacttgaaacctggagccccgaagcccaaagccaaccagcaaaagcaggacgacggccggggtctggtgcttcctggctacaagtacctcggacccttcaacggactcgacaagggggagcccgtcaacgcggcggacgcagcggccctcgagcacgacaaggcctacgaccagcagctcaaagcgggtgacaatccgtacctgcggtataaccacgccgacgccgagtttcaggagcgtctgcaagaagatacgtcttttgggggcaacctcgggcgagcagtcttccaggccaagaagcgggttctcgaacctctcggtctggttgaggaaggcgctaagacggctcctggaaagaaacgtccggtagagcagtcgccacaagagccagactcctcctcgggcatcggcaagacaggccagcagcccgctaaaaagagactcaattttggtcagactggcggctcagagtcagtccccgatccacaacctctcggagaacctccagcaacccccgctgctgtgggacctactacaatggcttcaggcggtggcgcaccaatggcagacaataacgaaggcgccgacggagtgggtaatgcctcaggaaattggcattgcgattccacatggctgggcgacagagtcatcaccaccagcacccgcacctgggccttgcccacctacaataaccacctctacaagcaaatctccagtgcttcaacgggggccagcaacgacaaccactacttcggctacagcaccccctgggggtattttgatttcaacagattccactgccacttttcaccacgtgactggcagcgactcatcaacaacaattggggattccggcccaagagactcaacttcaaactcttcaacatccaagtcaaggaggtcacgacgaatgatggcgtcacaaccatcgctaataaccttaccagcacggttcaagtcttctcggactcggagtaccagcttccgtacgtcctcggctctgcgcaccagggctgcctccctccgttcccggcggacgtgttcatgattccgcaatacggctacctgacgctcaacaatggcagccaagccgtgggacgttcatccttttactgcctggaatatttcccttctcagatgctgagaacgggcaacaactttaccttcagctacacctttgaggaagtgcctttccacagcagctacgcgcacagccagagcctggaccggctgatgaatcctcccatcgaccaatacctgtattacctgaacagaactcaaaatcagtccgggagtgcccaaaacaaggacttgctgtttagccgtgggtctccagctggcatgtctgttcagcccaaaaactggctacctggaccctgttatcggcagcagcgcgtttctaaaacaaaaacagacaacaacaacagcaattttacctggactggtgcttcaaaatataacctcaatgggcgtgaatccatcatcaaccctggcactgctatggcctcacacaaagacgacgaagacaagttctttcccatgagcggtgtcatgatttttggaaaagagagcgccggagcttcaaacactgcattggacaatgtcatgattacagacgaagaggaaattaaagccactaaccctgtggccaccgaaagatttgggaccgtggcagtcaatttccagagcagcagcacagaccctgcgaccggagatgtgcatgctatgggagcattacctggcatggtgtggcaagatagagacgtgtacctgcagggtcccatttgggccaaaattcctcacacagatggacactttcacccgtctcctcttatgggcggctttggactcaagaacccgcctcctcagatcctcatcaaaaacacgcctgttcctgcgaatcctccggcggagttttcagctacaaagtttgcttcattcatcacccaatactccacaggacaagtgagtgtggaaattgaatgggagctgcagaaagaaaacagcaagcgctggaatcccgaagtgcagtacacatccaattatgcaaaatctgccaacgttgactttactgtggacaacaatggactttatactgagcctcgccccattggcacccgttaccttacccgtcccctg

SEQ ID NO: 663 - DNA, 2208 bp, Artificial Sequence
  source: /note="Description of Artificial Sequence: Synthetic polynucleotide"
atggctgccgatggttatcttccagattggctcgaggacaacctctctgagggcattcgcgagtggtgggacttgaaacctggagccccgaagcccaaagccaaccagcaaaagcaggacgacggccggggtctggtgcttcctggctacaagtacctcggacccttcaacggactcgacaagggggagcccgtcaacgcggcggacgcagcggccctcgagcacgacaaggcctacgaccagcagctcaaagcgggtgacaatccgtacctgcggtataaccacgccgacgccgagtttcaagagcgtctgcaagaagatacgtcttttgggggcaacctcgggcgagcagtcttccaggccaagaagcgggttctcgaacctctcggtctggttgaggaaggcgctaagacggctcctggaaagaaacgtccggtagagcagtcgccacaagagccagactcctcctcgggcatcggcaagacaggccagcagcccgctaaaaagagactcaattttggtcagactggcgactcagagtcagtccccgatccgcaacctctcggagaacctccagcaacccccgctgctgtgggacctactacaatggcttcaggcggtggcgcaccaatggcagacaataacgaaggcgccgacggagtgggtaatgcctcaggaaattggcattgcgattccacatggctgggcgacagagtcatcaccaccagcacccgcacctgggccttgcccacctacaataaccacctctacaagcaaatctccagtgcttcaacgggggccagcaacgacaaccactacttcggctacagcaccccctgggggtattttgatttcaacagattccactgccacttttcaccacgtgactggcagcgactcatcaacaacaattggggattccggcccaagagactcaacttcaaactcttcaacatccaagtcaaggaggtcacgacgaatgatggcgtcacaaccatcgctaataaccttaccagcacggttcaagtcttctcggactcggagtaccagcttccgtacgtcctcggctctgcgcaccagggctgcctccctccgttcccggcggacgtgttcatgattccgcaatacggctacctgacgctcaacaatggcagccaagccgtgggacgttcatccttttactgcctggaatatttcccttctcagatgctgagaacgggcaacaactttaccttcagctacacctttgaggaagtgcctttccacagcagctacgcgcacagccagagcctggaccggctgatgaatcctctcatcgaccaatacctgtattacctgaacagaactcaaaatcagtccggaagtgcccaaaacaaggacttgctgtttagccgtgggtctccagctggcatgtctgttcagcccaaaaactggctacctggaccctgttatcggcagcagcgcgtttctaaaacaaaaacagacaacaacaacagcaattttacctggactggtgcttcaaaatataacctcaatgggcgtgaatccatcatcaaccctggcactgctgtggcctcacacaaagacgacgaagacaagttctttcccatgagcggtgtcatgatttttggaaaagagagcgccggagcttcaaacactgcattggacaatgtcatgattacagacgaagaggaaattaaagccactaaccctgtggccaccgaaagatttgggaccgtggcagtcaatttccagagcagcagcacagaccctgcgaccggagatgtgcatgctatgggagcattacctggcatggtgtggcaagatagagacgtgtacctgcagggtcccatttgggccaaaattcctcacacagatggacactttcacccgtctcctcttatgggcggctttggactcaagaacccgcctcctcagatcctcatcaaaaacacgcctgttcctgcgaatcctccggcggagttttcagctacaaagtttgcttcattcatcacccaatactccacaggacaagtgagtgtggaaattgaatgggagctgcagaaagaaaacagcaagcgctggaatcccgaagtgcagtacacatccaattatgcaaaatctgccaacgttgattttactgtggacaacaatggactttatactgagcctcgccccattggcacccgttaccttacccgtcccctg

SEQ ID NO: 664 - DNA, 2208 bp, Artificial Sequence
  source: /note="Description of Artificial Sequence: Synthetic polynucleotide"
atggctgccgatggttatcttccagattggctcgaggacaacctctctgagggcattcgcgagtggtgggacttgaaacctggagccccgaagcccaaagccaaccagcaaaagcaggacgacggccggggtctggtgcttcctggctacaagtacctcggacccttcaacggactcgacaagggggagcccgtcaacgcggcggacgcagcggccctcgagcacgacaaggcctacgaccagcagctcaaagcgggtgacaatccgtacctgcggtataaccacgccgacgccgagtttcaggagcgtctgcaagaagatacgtcttttgggggcaacctcgggcgagcagtcttccaggccaagaagcgggttctcgaacctctcggtctggttgaggaaggcgctaagacggctcctggaaagaaacgtccggtagagcagtcgccacaagagccagactcctcctcgggcatcggcaagacaggccagcagcccgctaaaaagagactcaattttggtcagactggcgactcagagtcagtccccgatccacaacctctcggagaacctccagcaacccccgctgctgtgggacctactacaatggcttcaggcggtggcgcaccaatggcagacaataacgaaggcgccgacggagtgggtaatgcctcaggaaattggcattgcgattccacatggctgggcgacagagtcatcaccaccagcacccgcacctgggccttgcccacctacaataaccacctctacaagcaaatctccagtgcttcaacgggggccagcaacgacaaccactacttcggctacagcaccccctgggggtattttgatttcaacagattccactgccacttttcaccacgtgactggcagcaactcatcaacaacaattggggattccggcccaagagactcaacttcaaactcttcaacatccaagtcaaggaggtcacgacgaatgatggcgtcacaaccatcgctaataaccttaccagcacggttcaagtcttctcggactcggagtaccagcttccgtacgtcctcggctctgcgcaccagggctgcctccctccgttcccggcggacgtgttcatgattccgcaatacggctacctgacgctcaacaatggcagccaagccgtgggacgttcatccttttactgcctggaatatttcccttctcagatgctgagaacgggcaacaactttaccttcagctacacctttgaggaagtgcctttccacagcagctacgcgcacagccagagcctggaccggctgatgaatcctctcatcgaccaatacctgtattacctgaacagaactcaaaatcagtccggaagtgcccaaaacaaggacttgctgtttagccgtgggtctccagctggcatgtctgttcagcccaaaaactggctacctggaccctgttatcggcagcagcgcgtttctaaaacaaaaacagacaacaacaacagcaattttacctggactggtgcttcaaaatataacctcaatgggcgtgaatccatcatcaaccctggcactgctatggcctcacacaaagacgacgaagacaagttctttcccatgagcggtgtcatgatttttggaaaagagagcgccggagcttcaaacactgcattggacaatgtcatgattacagacgaagaggaaattaaagccactaaccctgtggccaccgaaagatttgggaccgtggcagtcaatttccagagcaccagcacagaccctgcgaccggagatgtgcatgctatgggagcattacctggcatggtgtggcaagatagagacgtgtacctgcagggtcccatttgggccaaaattcctcacacagatggacactttcacccgtctcctcttatgggcggctttggactcaagaacccgcctcctcagatcctcatcaaaaacacgcctgttcctgcgaatcctccggcggagttttcagctacaaagtttgcttcattcatcacccaatactccacaggacaagtgagtgtggaaattgaatgggagctgcagaaagaaaacagcaagcgctggaatcccgaagtgcagtacacatccaattatgcaaaatctgccgacgttgattttactgtggacaacaatggactttatactgagcctcgccccattggcacccgttaccttacccgtcccctg

SEQ ID NO: 665 - DNA, 2208 bp, Artificial Sequence
  source: /note="Description of Artificial Sequence: Synthetic polynucleotide"
atggctgccgatggttatcttccagattggctcgaggacaacctctctgagggcattcgcgagtggtgggacttgaaacctggagccccgaagcccaaagccaaccagcaaaagcaggacgacggccggggtctggtgcttcctggctacaagtacctcggacccttcaacggactcgacaagggggagcccgtcaacgcggcggacgcagcggccctcgagcacgacaaggcctacgaccagcagctcaaagcgggtgacaatccgtacctgcggtataaccacgccgacgccgagtttcaagagcgtctgcaagaagatacgtcttttgggggcaacctcgggcgagcagtcttccaggccaagaagcgggttctcgaacctctcggtctggttgaggaaggcgctaagacggctcctggaaagaaacgtccggtagagcagtcgccacaagagccagactcctcctcgggcatcggcaagacaggccagcagcccgctaaaaagagactcaattttggtcagactggcgactcagagtcagtccccgatccgcaacctctcggagaacctccagcaacccccgctgctgtgggacctactacaatggcttcaggcggtggcgcaccaatggcagacaataacgaaggcgccgacggagtgggtaatgcctcaggaaattggcattgcgattccacatggctgggcgacagagtcatcaccaccagcacccgcacctgggccttgcccacctacaataaccacctctacaagcaaatctccagtgcttcaacgggggccagcaacgacaaccactacttcggctacagcaccccctgggggtattttgatttcaacagattccactgccacttttcaccacgtgactggcagcgactcatcaacaacaattggggattccggcccaagagactcaacttcaaactcttcaacatccaagtcaaggaggtcacgacgaatgatggcgtcacaaccatcgctaataaccttaccagcacggttcaagtcttctcggactcggagtaccagcctccgtacgtcctcggctctgcgcaccagggctgcctccctccgttcccggcggacgtgttcatgattccgcaatacggccacctgacgctcaacaatggcagccaagccgtgggacgttcatccttttactgcctggaatatttcccttctcagatgctgagaacgggcaacaactttaccttcagctacacctttgaggaagtgcctttccacagcagctacgcgcacagccagagcctggaccggctgacgaatcctctcatcgaccaatacctgtattacctgaacagaactcaaaatcagtccggaagtgcccaaaacaaggacttgctgtttagccgtgggtctccagctggcatgtctgttcagcccaaaaactggctacctggaccctgttatcggcagcagcgcgtttctaaaacaaaaacagacaacaacaacagcaattttacctggactggtgcttcaaaatataacctcaatgggcgtgaatccatcatcaaccctggcactgctatggcctcacacaaagacgacgaagacaagttctttcccatgagcggtgtcatgatttttggaaaagagagcgccggagcttcaaacactgcattggacaatgtcatgattacagacgaagaggaaattaaagccactaaccctgtggccaccgaaagatttgggaccgtggcagtcaatttccagagcagcagcacagaccctgcgaccggagatgtgcatgctatgggagcattacctggcatggtgtggcaagatagagacgtgtacctgcagggtcccatttgggccaaaattcctcacacagatggacactttcacccgtctcctcttatgggcggctttggactcaagaacccgcctcctcagatcctcatcaaaaacacgcctgttcctgcgaatcctccggcggagttttcagctacaaagtttgcttcattcatcacccaatactccacaggacaagtgagtgtggaaattgaatgggagctgcagaaagaaaacagcaagcgctggaatcccgaagtgcagtacacatccaattatgcaaaatctgccaacgttgattttactgtggacaacaatggactttatactgagcctcgccccattggcacccgttaccttacccgtcccctg

SEQ ID NO: 666 - DNA, 2208 bp, Artificial Sequence
  source: /note="Description of Artificial Sequence: Synthetic polynucleotide"
atggctgccgatggttatcttccagattggctcgaggacaacctctctgagggcattcgcgagtggtgggacttgaaacctggagccccgaagcccaaagccaaccagcaagagcaggacgacggccggggtctggtgcttcctggctacaagtacctcggacccttcaacggactcgacaagggggagcccgtcaacgcggcggacgcagcggccctcgagcacgacaaggcctacgaccagcagctcaaagcgggtgacaatccgtacctgcggtataaccacgccgacgccgagtttcaggagcgtctgcaagaagatacgtcttttgggggcaacctcgggcgagcagtcttccaggccaagaagcgggttctcgaacctctcggtctggttgaggaaggcgctaagacggctcctggaaagaaacgtccggtagagcagtcgccacaagagccagactcctcctcgggcatcggcaagacaggccagcagcccgctaaaaagagactcaattttggtcagactggcgactcagagtcagtccccgatccacaacctctcggagaacctccagcaacccccgctgctgtgggacctactacaatggcttcaggcggtggcgcaccaatggcagacaataacgaaggcgccgacggagtgggtaatgcctcaggaaattggcattgcgattccacatggctgggcgacagagtcatcaccaccagcacccgcacctgggccttgcccacctacaataaccacctctacaagcaaatctccagtgcttcaacgggggccagcaacgacaaccactacttcggctacagcaccccctgggggtattttgatttcaacagattccactgccacttttcaccacgtgactggcagcgactcatcaacaacaattggggattccggcccaagagactcaacttcaaactcttcaacatccaagtcaaggaggtcacgacgaatgatggcgtcacaaccatcgctaataaccttaccagcacggttcaagtcttctcggactcggagtaccagcttccgtacgtcctcggctctgcgcaccagggctgcctccctccgttcccggcggacgtgttcatgattccgcaatacggctacctgacgctcaacaatggcagccaagccgtgggacgttcatccttttactgcctggaatatttcccttctcagatgctgagaacgggcaacaactttaccttcagctacacctttgaggaagtgcctttccacagcagctacgcgcacagccagagcctggaccggctgatgaatcctctcatcgaccaatacctgtattacctgaacagaactcaaaatcagtccggaagtgcccaaaacaaggacttgctgtttagccgtgggtctccagctggcatgtctgttcagcccaaaaactggctacctggaccctgttatcggcagcagcgcgtttctaaaacaaaaacagacaacaacaacagcaattttacctggactggtgcttcaaaatataacctcaatgggcgtgaatccatcatcaaccctggcactgctatggcctcacacaaagacgacgaagacaagttctttcccatgagcggtgtcatgatttttggaaaagagagcgccggagcttcaaacactgcattggacaatgtcatgattacagacgaagaggaaattaaagccactaaccctgtggccaccgaaagatttgggaccgtggcagtcaatttccagagcagcagcacagaccctgcgaccggagatgtgcatgctacgggaacattacctggcatggtgtggcaagatagagacgtgtacctgcagggtcccatttgggccaaaattcctcacacagatggacactttcacccgtctcctcttatgggcggctttggactcaagaacccgcctcctcagatcctcatcaaaaccacgcctgttcctgcgaatcctccggcggagttttcagctacaaagtttgcttcattcatcacccagtactccacaggacaagtgagtgtggaaattgaatgggagctgcagaaagaaaacagcaagcgctggaatcccgaagtgcagtacacatccaattatgcaaaatctgccaacgttgattttactgtggacgacaatggactttatactgagcctcgccccattggcacccgttaccttacccgtcccctg

SEQ ID NO: 667 - DNA, 2208 bp, Artificial Sequence
  source: /note="Description of Artificial Sequence: Synthetic polynucleotide"
atggctgccgatggttatcttccagattggctcgaggacaacctctctgagggcattcgcgagtggtgggacttgaaacctggagccccgaagcccaaagccaaccagcaaaagcaggacgacggccggggtctggtgcttcctggctacaagtacctcggacccttcaacggactcgacaagggggagcccgtcaacgcggcggacgcagcggccctcgagcacgacaaggcctacgaccagcagctcaaagcgggtgacaatccgtacctgcggtataaccacgccgacgccgagtttcaggagcgtctgcaagaagatacgtcttttgggggcaacctcgggcgagcagtcttccaggccaagaagcgggttctcgaacctctcggtctggttgaggaaggcgctaagacggctcctggaaagaaacgtccggtagagcagtcgctacaagagccagactcctcctcgggcatcggcaagacaggccagcagcccgctaaaaagagactcaattttggtcagactggcgactcagagtcagtccccgatccacaacctctcggagaacctccagcaacccccgctgctgtgggacctactacaatggcttcaggcggtggcgcaccaatggcagacaataacgaaggcgccgacggagtgggtaatgcctcaggaaattggcattgcgattccacatggctgggcgacagagtcatcaccaccagcacccgcacctgggccttgcccacctacaataaccacctctacaagcaaatctccagtgcttcaacgggggccagcaacgacaaccactacttcggctacagcaccccctgggggtattttgatttcaacagattccactgccacttttcaccacgtgactggcagcgactcatcaacaacaattggggattccggcccaagagactcaacttcaaactcttcaacatccaagtcaaggaggtcacgacgaatgatggcgtcacaaccatcgctaataaccttaccagcacggttcaagtcttctcggactcggagtaccagcttccgtacgtcctcggctctgcgcaccagggctgcctccctccgttcccggcggacgtgttcatgattccgcaatacggctacctgacgctcaacaatggcagccaagccgtgggacgttcatccttttactgcctggaatatttcccttctcagatgctgagaacgggcaacaactttaccttcagctacacctttgaggaagtgcctttccacagcagctacgcgcacagccagagcctggaccggctgatgaatcctctcatcgaccaatacctgtattacctgaacagaactcaaaatcagtccggaagtgcccaaaacaaggacttgctgtttagccgtgggtctccagctggcatgtctgttcagcccaaaaactggctacctggaccctgttatcggcagcagcgcgtttctaaaacaaaaacagacaacgacaacagcaattttacctggactggtgcttcaaaatataacctcaatgggcgtgaatccatcatcaaccctggcactgctatggcctcacacaaagacgacgaagacaagttctttcccatgagcggtgtcatgatttttggaaaagagagcgccggagcttcaaacactgcattggacaatgtcatgattacagacgaagaggaaattaaagccactaaccctgtggccaccgaaagatttgggaccgtggcagtcaatttccagagcagcagcacagaccctgcgaccggagatgtgcatgctatgggagcattacctggcatggtgtggcaagatagagacgtgtacctgcagggtcccatttgggccaaaattcctcacacagatggacactttcacccgtctcctcttatgggcggctttggactcaagaacccgcctcctcagatcctcatcaaaaacacgcctgttcctgcgaatcctccggcggagttttcagctacaaagtttgcttcattcatcacccaatactccacaggacaagtgagtgtggaaattgaatgggagctgcagaaagaaaacagcaagcgctggaatcccgaagtgcagtacacatccaattatgcaaaatctgccaacgttgattttactgtggacaacaatggactttatactgagcctcgccccattggcacccgttaccttacccgtcccctg

SEQ ID NO: 668 - DNA, 2208 bp, Artificial Sequence
  source: /note="Description of Artificial Sequence: Synthetic polynucleotide"
atggctgccgatggttatcttccagattggctcgaggacaacctctctgagggcattcgcgagtggtgggacttgaaacctggagctccgaagcccaaagccaaccagcaaaagcaggacgacggccggggtctggtgcttcctggctacaagtacctcggacccttcaacggactcgacaagggggagcccgtcaacgcggcggacgcagcggccctcgagcacgacaaggcctacgaccagcagctcaaagcgggtgacaatccgtacctgcggtataaccacgccgacgccgagtttcaggagcgtctgcaagaagatacgtcttttgggggcaacctcgggcgagcagtcttccaggccaagaagcgggttctcgaacctctcggtctggttgaggaaggcgctaagacggctcctggaaagaaacgtccggtagagcagtcgccacaagagccagactcctcctcgggcatcggcaagacaggccagcagcccgctaaaaagagactcaattttggtcagactggcgactcagagtcagtccccgatccacaacctctcggagaacctccagcaacccccgctgctgtgggacctactacaatggcttcaggcggtggcgcaccaatggcagacaataacgaaggcgccgacggagtgggtaatgcctcaggaaattggcattgcgattccacatggctgggcgacagagtcatcaccaccagcacccgcacctgggccttgcccacctacaataaccacctctacaagcaaatctccagtgcttcaacgggggccagcaacgacaaccactacttcggctacagcaccccctgggggtattttgatttcaacagattccactgccacttttcaccacgtgactggcagcgactcatcaacaacaattggggattccggcccaagagactcaacttcaaactcttcaacatccaagtcaaggaggtcacgacgaatgatggcgtcacaaccatcgctaataaccttaccagcacggttcaagtcttctcggactcggagtaccagcttccgtacgtcctcggctctgcgcaccagggctgcctccctccgttcccggcggacgtgttcatgattccgcaatacggctacctgacgctcaacaatggcagccaagccgtgggacgttcatccttttactgcctggaatatttcccttctcagatgctgagaacgggcaacaactttaccttcagctacacctttgaggaagcgcctttccacagcagctacgcgcacagccagagcctggaccggctgatgaatcctctcatcgaccaatacctgtattacctgaacagaactcaaaatcagtccggaagtgcccaaaacaaggacttgctgtttagccgtgggtctccagctggcatgtctgttcagcccaaaaactggctacctggaccctgttatcggcagcagcgcgtttctaaaacaaaaacagacaacaacaacagcaattttacctggactggtgcttcaaaatataacctcaatgggcgtgaatccatcatcaaccctggcactgctatggcctcacacaaagacgacgaagacaagttctttcccatgagcggtgtcatgatttttggaaaagagagcgccggagcttcaaacactgcattggacaatgtcatgattacagacgaagaggaaattaaagccactaaccctgtggccaccgaaagatttgggaccgtggcagtcaatttccagagcagcagcacagaccctgcgaccggagatgtgcatgctatgggagcattacctggcatggtgtggcaagatagagacgtgtacctgcagggtcccatttgggccaaaattcctcacacagatggacactttcacccgtctcctcttatgggcggctttggactcaagaacccgcctcctcagatcctcatcaaaaacacgcctgttcctgcgaatcctccggcggagttttcagctacaaagtttgcttcattcatcacccaatactccacaggacaagtgagtgtggaaattgaatgggagctgcagaaagaaaacagcaagcgctggaatcccgaagtgcagtacacatccaattatgcgaaatctgccaacgttgattttactgtggacaacaatggactttatactgagcctcgccccgttggcacccgttaccttacccgtcccctg

SEQ ID NO: 669 - DNA, 2208 bp, Artificial Sequence
  source: /note="Description of Artificial Sequence: Synthetic polynucleotide"
atggctgccgatggttatcttccagattggctcgaggacaacctctctgagggcattcgcgagtggtgggacttgaaacctggagccccgaagcccaaagccaaccagcaaaagcaggacgacggccggggtctggtgcttcctggctacaagtacctcggacccttcaacggactcgacaagggggagcccgtcaacgcggcggacgcagcggccctcgagcacgacaaggcctacgaccagcagctcaaagcgggtgacaatccatacctgcggtataaccacgccgacgccgagtttcaggagcgtctgcaagaaaatacgtcttttgggggcaacctcgggcgagcagtcttccaggccaagaagcgggttctcgaacctctcggtctggttgaggaaggcgctaagacggctcctggaaagaaacgtccggtagagcagtcgccacaagagccagactcctcctcgggcatcggcaagacaggccagcagcccgctaaaaagagactcaattttggtcagactggcgactcagagtcagtccccgatccacaacctctcggagaacctccagcaacccccgctgctgtgggacctactacaatggcttcaggcggtggcgcaccaatggcagacaataacgaaggcgccgacggagtgggtaatgcctcaggaaattggcattgcgattccacatggctgggcgacagagtcatcaccaccagcacccgcacctgggccttgcccacctacaataaccacctctacaagcaaatctccagtgcttcaacgggggccagcaacgacaaccactacttcggctacagcaccccctgggggtattttgatttcaacagattccactgccactttccaccacgtgactggcagcgactcatcaacaacaattggggattccggcccaagagactcaacttcaaactcttcaacatccaagtcaaggaggtcacgtcgaatgatggcgtcacaaccatcgctaataaccttaccagcacggttcaagtcttctcggactcggagtaccagcttccgtacgtcctcggctctgcgcaccagggctgcctccctccgttcccggcggacgtgttcatgattccgcaatacggctacctgacgctcaacaatggcagccaagccgtgggacgttcatccttttactgcctggaatatttcccttctcagatgctgagaacgggcaacaactttaccttcagctacacctttgaggaagtgcctttccacagcagctacgcgcacagccagagcctggaccggctgatgaatcctctcatcgaccaatacctgtattacctgaacagaactcaaaatcagtccggaagtgcccaaaacaaggacttgctgtttagccgtgggtctccagctggcatgtctgttcagcccaaaaactggctacctggtccctgttatcggcagcagcgcgtttctaaaacaaaaacagacaacaacaacagcaattttacctggactggtgcttcaaaatataacctcaatgggcgtgaatccatcatcaaccctggcactgctatggcctcacacaaagacgacgaagacaagttctttcccatgagcggtgtcatgatttttggaaaagagagcgccggagcttcaaacactgcattggacaatgtcatgattacagacgaagaggaaattaaagccactaaccctgtggccaccgaaagatttgggaccgtggcagtcaatttccagagcagcagcacagaccctgcgaccggagatgtgcatgctatgggagcattacctggcatggtgtggcaagatagagacgtgtacctgcagggtcccatttgggccaaaattcctcacacagatggacactttcacccgtctcctcttatgggcggctttggactcaagaacccgcctcctcagatcctcatcaaaaacacgcctgttcctgcgaatcctccggcggagttttcagctacaaagtttgcttcattcatcacccaatactccacaggacaagtgagtgtggaaattgaatgggagctgcagaaagaaaacagcaagcgctggaatcccgaagtgcagtacacatccaattatgcaaaatctgccaacgttgattttactgtggacaacaatggactttatactgagcctcgccccattggcacccgttaccttacccgtcccctg

SEQ ID NO: 670 - DNA, 2208 bp, Artificial Sequence
  source: /note="Description of Artificial Sequence: Synthetic polynucleotide"
atggctgccgatggttatcttccagattggctcgaggacaacctctctgagggcattcgcgagtggtgggacttgaaacctggagccccgaagcccaaagccaaccagcaaaagcaggacgacggccggggtctggtgcttcctggctacaagtacctcggacccttcaacggactcgacaagggggagcccgtcaacgcggcggacgcagcggccctcgagcacgacaaggcctacgaccagcagctcaaagcgggtgacaatccgtacctgcggtataaccacgccgacgccgagtttcaggagcgtctgcaagaagatacgtcttttgggggcaacctcgggcgagcagtcttccaggccaagaagcgggttctcgaacctctcggtctggttgaggaaggcgctaagacggctcctggaaagaaacgtccggtagagcagtcgccacaagagccagactcctcctcgggcatcggcaagacaggccagcagcccgctaaaaagagactcaattttggtcagactggcgactcagagtcagtccccgatccacaacctctcggagaacctccagcaacccccgctgctgtgggacctactacaatggcttcaggcggtggcgcaccaatggcagacaataacgaaggcgccgacggagtgggtaatgcctcaggaaattggcattgcgattccacatggctgggcgacagagtcatcaccaccagcacccgcacctgggccttgcccacctacaataaccacctctacaagcaaatctccagtgcttcaacgggggccagcaacgacaaccactacttcggctacagcaccccctgggggtattttgatttcaacagattccactgccacttttcaccacgtgactggcagcgactcatcaacaacaattggggattccggcccaagagactcaacttcaaactcttcaacatccaagtcaaggaggtcacgacgaatgatggcgtcacaaccatcgctaataaccttaccagcacggttcaagtcttctcggactcggagtaccagcttccgtacgtcctcggctctgcgcaccagggctgcctccctccgttcccggcggacgtgttcatgattccgcaatacggctacctgacgctcaacaatggcagccaagccgtgggacgttcatccttttactgcctggaatatttcccttctcagatgctgagaacgggcaacaactttaccttcagctacacctttgaggaagtgcctttccacagcagctacgcgcacagccagagcctggaccggctgatgaatcctctcatcgaccaatacctgtattacctgaacagaactcaaaatcagtccggaagtgcccaaaacaaggacttgctgtttagccgtgggtctccagctggcacgtctgttcagcccaaaaactggctacctggaccctgttatcggcagcagcgcgtttctaaaacaaaaacagacaacaacaacagcaattttacctggactggtgcttcaaaatataacctcaatgggcgtgaatccatcatcaaccctggcactgctatggcctcacacaaagacgacgaagacaagttctttcccatgagcggtgtcatgatttttggaaaagagagcgccggagcttcaaacactgcattggacaatgtcatgattacagacgaagaggaaattaaagccactaaccctgtggccaccgaaagatttgggaccgtggcagtcaatttccagagcagcagcacagaccctgcgaccggagatgtgcatgctatgggagcattacctggcatggtgtggcaagatagagacgtgtacctgcagggtcccatttgggccaaaattcctcacacagatggacactttcacccgtctcctcttatgggcggctttggactcaagaacccgcctcctcagatcctcatcaaaaacacgcctgttcctgcgaatcctccggcggagttttcagctacaaagtttgcttcattcatcacccaatactccacaggacaagtgagtgtggaaattgaatgggagctgcagaaagaaaacagcaagcgctggaatcccgaagtgcagtacacatccaattatgcaaaatctgccaacgttgattttactgtggacaacaatggactttatactgggcctcgccccattggcacccgttaccttacccgtcccctg

SEQ ID NO: 671 - DNA, 2208 bp, Artificial Sequence
  source: /note="Description of Artificial Sequence: Synthetic polynucleotide"
atggctgccgatggttatcttccagattggctcgaggacaacctctctgagggcattcgcgagtggtgggacttgaaacctggagccccgaagcccaaagccaaccagcaaaagcaggacgacggccggggtctggtgcttcctggctacaagtacctcggacccttcaacggactcgacaagggggagcccgtcaacgcggcggacgcagcggccctcgagcacgacaaggcctacgaccagcagctcaaagcgggtgacaatccgtacctgcggtataaccacgccgacgccgagtttcaggagcgtctgcaagaagatacgtcttttgggggcaacctcgggcgagcagtcttccaggccaagaagcgggttctcgaacctctcggtctggttgaggaaggcgctaagacggctcctggaaagaaacgtccggtagagcagtcgccacaagagccagactcctcctcgggcatcggcaagacaggccagcagcccgctaaaaagagactcaattttggtcagactggcgactcagagtcagtccccgatccacaacctctcggagaacctccagcaacccccgctgctgtgggacctactacaatggcttcaggcggtggcgcaccaatggcagacaataacgaaggcgccgacggagtgggtaatgccccaggaaattggcattgcgactccacatggctgggcgacagagtcatcaccaccagcacccgcacctgggccttgcccacctacaataaccacctctacaagcaaatctccagtgcttcaacgggggccagcaacgacaaccactacttcggctacagcaccccctgggggtattttgatttcaacagattccactgccacttttcaccacgtgactggcagcgactcatcaacaacaattggggattccggcccaagagactcaacttcaaactcttcaacatccaagtcaaggaggtcacgacgaatgatggcgtcacaaccatcgctaataaccttaccagcacggttcaagtcttctcggactcggagtaccagcttccgtacgtcctcggctctgcgcaccagggctgcctccctccgttcccggcggacgtgttcatgattccgcaatacggctacctgacgctcaacaatggcagccaagccgtgggacgttcatccttttactgcctggaatatttcccttctcagatgctgagaacgggcaacaactttaccttcagctacacctttgaggaagtgcctttccacagcagctacgcgcacagccagagcctggaccggctgatgaatcctctcatcgaccaatacctgtattacctgaacagaactcaaaatcagtccggaagtgcccaaaacaaggacttgctgtttagccgtgggtctccagctggcatgtctgttcagcccaaaaactggctacctggaccctgttatcggcagcagcgcgtttctaaaacaaaaacagacaacaacaacagcaattttacctggactggtgcttcaaaatataacctcaatgggcgtgaatccatcatcaaccctggcacagctatggcctcacacaaagacgacgaagacaagttctttcccatgagcggtgtcatgatttttggaaaagagagcgccggagcttcaaacactgcattggacaatgtcatgattacaggcgaagaggaaattaaagccactaaccctgtggccaccgaaagatttgggaccgtggcagtcaatttccagagcagcagcacagaccctgcgaccggagatgtgcatgctatgggagcattacctggcatggtgtggcaagatagagacgtgtacctgcagggtcccatttgggccaaaattcctcacacagatggacactttcacccgtctcctcttatgggcggctttggactcaagaacccgcctcctcagatcctcatcaaaaacacgcctgttcctgcgaatcctccggcggagttttcagctacaaagtttgcttcattcatcacccaatactccacaggacaagtgagtgtggaaattgaatgggagctgcagaaagaaaacagcaagcgctggaatcccgaagtgcagtacacatccaattatgcaaaatctgccaacgttgattttactgtggacaacaatggactttatactgagcctcgccccattggcacccgttaccttacccgtcccctg

SEQ ID NO: 672 - DNA, 2208 bp, Artificial Sequence
  source: /note="Description of Artificial Sequence: Synthetic polynucleotide"
atggctgccgatggttatcttccagattggctcgaggacaacctctctgagggcattcgcgagtggtgggacttgaaacctggagccccgaagcccaaagccaaccagcaaaagcaggacgacggccggggtctggtgcttcctggctacaagtacctcggacccttcaacagactcgacaagggggagcccgtcaacgcggcggacgcagcggccctcgagcacgacaaggcctacgaccagcagctcaaagcgggtgacaatccgtacctgcggtataaccacgccgacgccgagtttcaggagcgtctgcaagaagatacgtcttttgggggcaacctcgggcgagcagtcttccaggccaagaagcgggttctcgaacctctcggtctggttgaggaaggcgctaagacggctcctggaaggaaacgtccggtagagcagtcgccacaagagccagactcctcctcgggcatcggcaagacaggccagcagcccgctaaaaagagactcaattttggtcagactggcgactcagagtcagtccccgatccacaacctctcggagaacctccagcaacccccgctgctgtgggacctactacaatggcttcaggcggtggcgcgccaatggcagacaataacgaaggcgccgacggagtgggtaatgcctcaggaaattggcattgcgattccacatggctgggcgacagagtcatcaccaccagcacccgcacctgggccttgcccacctacaataaccacctctacaagcaaatctccagtgcttcaacgggggccagcaacgacaaccactacttcggctacagcaccccctgggggtattttgatttcaacagattccactgccacttttcaccacgtgactggcagcgactcatcaacaacaattggggattccggcccaagagactcaacttcaaactcttcaacatccaagtcaaggaggtcacgacgaatgatggcgtcacaaccatcgctaataaccttaccagcacggttcaagtcttctcggactcggagtaccagcttccgtacgtcctcggctctgcgcaccagggctgcctccctccgttcccggcggacgtgttcatgattccgcaatacggctacctgacgctcaacaatggcggccaagccgtgggacgttcatccttttactgcctggaatatttcccttctcagatgctgagaacgggcaacaactttaccttcagctacacctttgaggaagtgcctttccacagcagctacgcgcacagccagagcctggaccggctgatgaatcctctcatcgaccaatacctgtattacctgaacagaactcaaaatcagtccggaagtgcccaaaacaaggacttgctgtttagccgtgggtctccagctggcatgtctgttcagcccaaaaactggctacctggaccctgttatcggcagcagcgcgtttctaaaacaaaaacagacaacaacaacagcaattttacctggactggtgcttcaaaatatagcctcaatgggcgtgaatccatcatcaaccctggcactgctatggcctcacacaaagacgacgaagacaagttctttcccatgggcggtgtcatgatttttggaaaagagagcgccggagcttcaaacactgcattggacaatgccatgattacagacgaagaggaaattaaagccactaaccctgtggccaccgaaagatttgggaccgtggcagtcaatttccagagcagcagcacagaccctgcgaccggagatgtgcatgctatgggagcattacctggcatggtgtggcaagatagagacgtgtacctgcagggtcccatttgggccaaaattcctcacacagatggacactttcacccgtctcctcttatgggcggctttggactcaagaacccgcctcctcagatcctcatcaaaaacacgcctgttcctgcgaatcctccggcggagttttcagctacaaagtttgcttcattcatcacccaatactccacaggacaagtgagtgtggaaattgaatgggagctgcagaaagaaaacagcaagcgctggaatcccgaagtgcagtacacatccaattatgcaaaatctgccaacgttgattttactgtggacaacaatggactttatactgagcctcgccccattggcacccgttaccttacccgtcccctg

SEQ ID NO: 673 - DNA, 2208 bp, Artificial Sequence
  source: /note="Description of Artificial Sequence: Synthetic polynucleotide"
atggctgccgatggttatcttccagattggctcgaggacaacctctctgagggcattcgcgagtggtgggacttgaaacctggagccccgaagcccaaagccaaccagcaaaagcaggacgacggccggggtctggtgcttcctggctacaagtacctcggacccttcaacggactcgacaagggggagcccgtcaacgcggcggacgcagcggccctcgagcacgacaaggcctacgaccagcagctcaaagcgggtgacaatccgtacctgcggtataaccacgccgacgccgagtttcaggagcgtctgcaagaagatacgtcttttgggggcaacctcgggcgagcagtcttccaggccaagaagcgggttctcgaacctctcggtctggttgaggaaggcgctaagacggctcctggaaagaaacgtccggtagagcagtcgccacaagagccagactcctcctcgggcatcggcaagacaggccagcagcccgctaaaaagagactcaattttggtcagactggcgactcagagtcagtccccgatccacaacctctcggagaacctccagcaacccccgctgctgtgggacctactacaatggcttcaggcggtggcgcaccaatggcagacaataacgaaggcgccgacggagtgggtaatgcctcaggaaattggcattgcgattccacatggctgggcggcagagtcatcaccaccagcacccgcacctgggccttgcccacctacaataaccacctctacaagcaaatctccagtgcttcaacgggggccagcaacgacaaccactacttcggctacagcaccccctgggggtattttgatttcaacagattccactgccacttttcaccacgtgactggcagcgactcatcaacaacaattggggattccggcccaagagactcaacttcaaactcttcaacatccaagtcaaggaggtcacgacgaatgatggcgtcacaaccatcgctaataaccttaccagcacggttcaagtcttctcggactcggagtaccagcttccgtacgtcctcggctctgcgcaccagggctgcctccctccgttcccggcggacgtgttcatgattccgcaatacggctacctgacgctcaacaatggcagccaagccgtgggacgttcatccttttactgcctggaatatttcccttctcagatgctgagaacgggcaacaactctaccttcagctacacctttgaggaagtgcctttccacagcagctacgcgcacagccagagcctggaccggctgatgaatcctctcatcgaccaatacctgtattacctgaacagaactcaaaatcagtccggaagtgcccaaaacaaggacttgctgtttagccgtgggtctccagctggcatgtctgttcagcccaaaaactggctacctggaccctgttatcggcagcagcgcgtttctaaaacaaaaacagacaacaacaacagcaattttacctggactggtgcttcaaaatataacctcaatgggcgtgaatccatcatcaaccctggcactgctatggcctcacacaaagacgacgaagacaagttctttcccatgagcggtgtcatgatttttggaaaagagagcgccggagcttcaaacactgcattggacaatgtcatgattacagacgaagaggaaattaaagccactaaccctgtggccaccgaaagatttgggaccgtggcagtcaatttccagagcagcagcacagaccctgcgaccggagatgtgcatgctatgggaacattacctggcatggtgtggcaagatagagacgtgtacctgcagggtcccatttgggccaaaattcctcacacagatggacactttcacccgtctcctcttatgggcggctttggactcaagaacccgcctcctcagatcctcatcaaaaacacgcctgttcctgcgaatcctccggcggagttttcagctacaaagtttgcttcattcatcacccaatactccacaggacaagtgagtgtggaaattgaatgggagctgcagaaagaaaacagcaagcgctggaatcccgaagtgcagtacacatccaattatgcaaaatctgccaacgttgattttactgtggacaacaatggactttatactgagcctcgccccattggcacccgttaccttacccgtcccctg

SEQ ID NO: 674 - DNA, 2208 bp, Artificial Sequence
  source: /note="Description of Artificial Sequence: Synthetic polynucleotide"
atggctgccgatggttatctcccagattggctcgaggacaacctctctgagggcattcgcgagtggtgggacttgaaacctggagccccgaagcccaaagccaaccagcaaaagcaggacgacggccggggtctggtgcttcctggctacaagtacctcggacccttcaacggactcgacaagggggagcccgtcagcgcggcggacgcagcggccctcgagcacgacaaggcctacgaccagcagctcaaagcgggtgacaatccgtacctgcggtataaccacgccgacgccgagtttcaggagcgtctgcaagaagatacgtcttttgggggcaacctcgggcgagcagtcttccaggccaagaagcgggttctcgaacctctcggtctggttgaggaaggcgctaagacggctcctggaaagaaacgtccggtagagcagtcgccacaagagccagactcctcctcgggcatcggcaagacaggccagcagcccgctaaagagagactcaattttggtcagactggcgactcagagtcagtccccgatccacaacctctcggagaacctccagcaacccccgctgctgtgggacctactacaatggcttcaggcggtggcgcaccaatggcagacaataacgaaggcgccgacggagtgggtaatgcctcaggaaattggcattgcgattccacatggctgggcgacagagtcatcaccaccagcacccgcacctgggccttgcccacctacaataaccacctctacaagcaaatctccagtgcttcaacgggggccagcaacgacaaccactacttcggctacagcaccccctgggggtattttgatttcaacagattccactgccacttttcaccacgtgactggcagcgactcatcaacaacaattggggattccggcccaagagactcaacttcaaactcttcaacatccaagtcaaggaggtcacgacgaatgatggcgtcacaaccatcgccaataaccttaccagcacggttcaagtcttctcggactcggagtaccagcttccgtacgtcctcggctctgcgcaccagggctgcctccctccgttcccggcggacgtgttcatgattccgcaatacggctacctgacgctcaacaatggcagccaagccgtgggacgttcatccttttactgcctggaatatttcccttctcagatgctgagaacgggcaacaactttaccttcagctacacctttgaggaagtgcctttccacagcagctacgcgcacagccagagcctggaccggctgatgaatcctctcatcgaccaatacctgtattacctgaacagaactcaaaatcagtccggaagtgcccaaaacaaggacttgctgtttagccgtgggtctccagctggcatgtctgttcagcccaaaaactggctacctggaccctgttatcggcagcagcgcgtttctaaaacaaaaacagacaacaacaacagcaattttacctggactggtgcttcaaaatataacctcaatgggcgtgaatccatcatcaaccctggcactgctatggcctcacacaaagacgacgaagacaagttctttcccatgagcggtgtcatgatttttggaaaagagagcgccggagcttcaaacactgcattggacaatgtcatgattacagacgaagaggaaattaaagccactaaccctgtggccaccgaaagatttgggaccgtggcagtcaatttccagagcagcagcacagaccctgcgaccggagatgtgcatgctatgggagcattacctggcatggtgtggcaagatagagacgtgtacctgcagggtcccatttgggccaaaattcctcacacagatggacactttcacccgtctcctcttatgggcggctttggactcaagaacccgcctcctcagatcctcatcaaaaacacgcctgttcctgcgaatcctccggcggagttttcagctacaaagtttgcttcattcatcacccaatactccacaggacaagtgagtgtggaaattgaatgggagctgcagaaagaaaacagcaagcgctggaatcccgaagtgcagtacacatccaattatgcaaaatctgccaacgttgattttactgtggacaacaatggactttatactgagcctcgccccattggcacccgttaccttacccgtcccctg

SEQ ID NO: 675 - DNA, 2208 bp, Artificial Sequence
  source: /note="Description of Artificial Sequence: Synthetic polynucleotide"
atggctgccgatggttatcttccagattggctcgaggacaacctctctgagggcattcgcgagtggtgggacttgaaacctggagccccgaagcccaaagccaaccagcaaaagcaggacgacggccggggtctggtgcttcctggctacaagtacctcggacccttcaacggactcgacaagggggagcccgtcaacgcggcggacgcagcggccctcgagcacgacaaggcctacgaccagcagctcaaagcgggtgacaatccgtacctgcggtataaccacgccgacgccgagtttcaggagcgtctgcaagaagatacgtcttttgggggcaacctcgggcgagcagtcttccaggccaagaagcgggttctcgaacctctcggtctggttgaggaaggcgctaagacggctcctggaaagaaacgtccggtagagcagtcgccacaagagccagactcctcctcgggcatcggcaagacaggccagcagcccgctaaaaagagactcaattttggtcagactggcgactcagagtcagtccccgatccacaacctctcggagaacctccagcaacccccgctgctgtgggacctactacaatggcttcaggcggtggcgcaccaatggcagacaataacgaaggcgccgacggagtgggtaatgcctcaggaaattggcattgcgattccacatggctgggcgacagagtcatcaccaccagcacccgcacctgggccttgcccacctacaataaccacctctacaagcaaatctccagtgcttcaacgggggccagcaacgacaaccactacttcggctacagcaccccctgggggtattttgatttcaacagattccactgccacttttcaccacgtgactggcagcgactcatcaacaacaattggggattccggcccaagagactcaacttcaaactcttcaacatccaagtcaaggaggtcacgacgaatgatggcgtcacaaccatcgctaataaccttaccagcacggttcaagtcttctcggactcggagtaccagcttccgtacgtcctcggctctgcgcaccagggctgcctccctccgttcccggcggacgtgttcatgattccgcaatacggctacctgacgctcaacaatggcagccaagccgtgggacgttcatccttttactgcctggaatatttcccttctcagatgctgagaacgggcaacaactttaccttcagctacacctttgaggaagtgcctttccacagcagctacgcgcacagccagagcctggaccggctgatgaatcctctcatcgaccaatacctgtattacctgaacagaactcaaaatcagtccggaagtgcccaaaacaaggacttgctgtttagccgtgggtctccagctggcatgtctgttcagcccaaaaactggctacctggaccctgttatcggcagcagcgcgtttctaaaacaaaaacagacaacaacaacagcaattttacctggactggtgcttcaaaatataacctcaatgggcgtgaatccatcatcaaccctggcactgctatggcctcacacaaagacgacgaagacaagttctttcccatgagcggtgtcatgatttttggaaaagagagcgccggagcttcaaacactgcattggacaatgtcatgattacagacgaaggggaaattaaagccactaaccctgtggccaccgaaagatttgggaccgtggcagtcaatttccagagcagcagcacagaccctgcgaccggagatgtgcatgctatgggagcattacctggcatggtgtggcaagatagagacgtgtacctgcagggtcccatttgggccaaaattcctcacacagatggacactttcacccgtctcctcttatgggcggctttggactcaagaacccgcctcctcagatcctcatcaaaaacacgcctgttcctgcgaatcctccggcggagttttcagctacaaagtttgcttcattcatcacccaatactccacaggacaagtgagtgtggaaattgaatgggagctgcagaaagaaaacagcaagcgctggaatcccgaagtgcagtacacatccaattatgcaaaatctgccaacgttgattttactgtggacaacaatggactttatactgagcctcgccccattggcacccgttaccttacccgtcccctg

SEQ ID NO: 676 - DNA, 2208 bp, Artificial Sequence
  source: /note="Description of Artificial Sequence: Synthetic polynucleotide"
atggctgccgatggttatcttccagattggctcgaggacaacctctctgagggcattcgcgagtggtgggacttgaaacctggagccccgaaacctaaagccaaccagcaaaagcaggacgacggccggggtctggtgcttcctggctacaagtacctcggacccttcaacggactcgacaagggggagcccgtcaacgcggcggacgcagcggccctcgagcacgacaaggcctacgaccagcagctcaaagcgggtgacaatccgtacctgcggtataaccacgccgacgccgagtttcaggagcgtctgcaagaagatacgtcttttgggggcaacctcgggcgagcagtcttccaggccaagaagcgggttctcgaaccttttggtctggttgaggaaggcgctaagacggctcctggaaagaaacgtccggtagagcagtcgccacaagagccagactcctcctcgggcatcggcaagacaggccagcagcccgctaaaaagagactcaattttggtcagactggcgactcagagtcagtccccgacccacaacctctcggagaacctccagcaacccccgctgctgtgggacctactacaatggcttcaggcggtggcgcaccaatggcagacaataacgaaggcgccgacggagtgggtaatgcctcaggaaattggcattgcgattccacatggctgggcgacagagtcatcaccaccagcacccgcacctgggccttgcccacctacaataaccacctctacaagcaaatctccagtgcttcaacgggggccagcaacgacaaccactacttcggctacagcaccccctgggggtattttgatttcaacagattccactgccacttttcaccacgtgactggcagcgactcatcaacaacaattggggattccggcccaagagactcaacttcaagctcttcaacatccaagtcaaggaggtcacgacgaacgatggcgtcacgaccatcgctaataaccttaccagcacggttcaagtcttctcggattcagagtaccaactgccgtacgtcctcggctctgcgcaccagggctgcctccctccgttcccggcggacgtgtttatgattccgcagtacggctacctaacgctcaacaatggcagccaggccgtgggacgttcatccttttactgcccggaatatttcccttctcagatgctgagaacgggcaacaactttaccttcagctacacctttgaggaagtgcctttccacagcagctacgcgcacagccagagcctggaccggctgatgaatcctctcatcgaccaatacctgtattacctgaacagaactcaaaatcagtccggaagtgcccaaaacaaggacttgctgtttagccgtgggtctccagctggcatgtctgttcagcccaaaaactggctacctggaccctgttatcggcagcagcgcgtttctaaaacaaaaacagacaacaacaacagcaattttacctggactggtgcttcaaaatataacctcaatgggcgtgaatccatcatcaaccctggcactgctatggcctcacacaaagacgacaaagacaagttctttcccatgagcggtgtcatgatttttggaaaagagagcgccggagcttcaaatactgcattggacaatgtcatgatcacagatgaagaggaaattaaagccactaaccctgtggccaccgaaagatttgggaccgtggcagtcaatttccagagcagcaacacagaccccgcgaccggagatgtgcatgttatgggagccttacctggcatggtgtggcaagacagagacgtatacctgcagggtcccatttgggccaaaattcctcacacggatggacactttcacccgtctcctctcatgggcggctttggacttaagcacccgcctcctcaaatcctcatcaaaaacacgcctgttcctgcgaatcctccggcagagttttcggctacaaagtttgcttcattcatcacccagtactccacaggacaagtgagtgtggaaattgaatgggagctgcagaaagaaaacagcaagcgctggaatcccgaagtgcagtacacatccaattatgcaaaatctgccaacgttgatttcactgtggacaacaatggactttatactgagcctcgccccattggcacccgttaccttacccgtcccttg

SEQ ID NO: 677 - DNA, 2208 bp, Artificial Sequence
  source: /note="Description of Artificial Sequence: Synthetic polynucleotide"
atggctgccgatggttatcttccagattggctcgaggacaacctctctgagggcattcgcgagtggtgggacttgaaacctggagccccgaaacctaaagccaaccagcaaaagcaggacgacggccggggtctggtgcttcctggctacaagtacctcggacccttcaacggactcgacaagggggagcccgtcaacgcggcggacgcagcggccctcgagcacgacaaggcctacgaccagcagctcaaagcgggtgacaatccgtacctgcggtataaccacgccgacgccgagtttcaggagcgtctacaagaagatacgtcttttgggggcaacctcgggcgagcagtcttccaggccaagaagcgggttctcgaaccttttggtctggttgaggaaggcgctaagacggctcctggaaagaaacgtccggtagagcagtcgccacaagagccagactcctcctcgggcatcggcaagacaggccagcagcccgctaaaaagagactcaattttggtcagactggcgactcagagtcagtccccgacccacaacctctcggagaacctccagcaacccccgctgctgtgggacctactacaatggcttcaggcggtggcgcaccaatggcagacaataacgaaggcgccgacggagtgggtaatgcctcaggaaattggcattgcgattccacatggctgggcgacagagtcatcaccaccagcacccgcacctgggccttgcccacctacaataaccacctctacaagcaaatctccagtgcttcaacgggggccagcaacgacaaccactacttcggctacagcaccccctgggggtattttgatttcaacagattccactgccacttttcaccacgtgactggcagcgactcatcaacaacaattggggattccggcccaagagactcaacttcaagctcttcaacatccaagtcaaggaggtcacgacgaacgatggcgtcacgaccatcgctaataaccttaccagcacggttcaagtcttctcggattcagagtaccaactgccgtacgtcctcggctctgcgcaccagggctgcctccctccgttcccggcggacgtgttcatgattccgcagtacggctacctaacgctcaacaatggcagccaggccgtgggacgttcatccttttactgcctggaatatttcccttctcagatgctgagaacgggcaacaactttaccttcagctacacctttgaggaagtgcctttccacagcagctacgcgcacagccagagcctggaccggctgatgaatcctctcatcgaccaatacctgtattacctgaacagaactcaaaatcagtccggaagtgcccaaaacaaggacttgctgtttagccgtgggtctccagctggcatgtctgttcagcccaaaaactggctacctggaccctgttatcggcagcagcgcgtttctaaaacaaaaacagacaacaacaacagcaattttacctggactggtgcttcaaaatataacctcaatgggcgtgaatccatcatcaaccctggcactgctatggcctcacacaaagacgacaaagacaagttctttcccatgagcggtgtcatgatttttggaaaagagagcgccggagcttcaaatactgcattggacaatgtcatgatcacagatgaagaggaaattaaagccactaaccctgtggccaccgaaagatttgggaccgtggcagtcaatttccagagcagcgacacagaccccgcgaccggagatgtgcatgttatgggagccttacctggcatggtgtggcaagacagagacgtatacctgcagggtcccatttgggccaaaattcctcacacggatggacactttcacccgtctcctctcatgggcggctttggacttaagcacccgcctcctcaaatcctcatcaaaaacacgcctgttcctgcgaatcctccggcagagttttcggctacaaagtttgcttcattcatcacccagtactccacaggacaagtgagtgtggaaattgaatgggagctgcagaaagaaaacagcaagcgctggaatcccgaagtgcagtacacatccaattatgcaaaatctgccaacgttgatttcactgtggacaacaatggactttatactgagcctcgccccattggcacccgttaccttacccgtcccttg

SEQ ID NO: 678 - DNA, 2208 bp, Artificial Sequence
  source: /note="Description of Artificial Sequence: Synthetic polynucleotide"
atggctgccgatggttatcttccagattggctcgaggacaacctctctgagggcattcgcgagtggtgggacttgaaacctggagccccgaaacctaaagccaaccagcaaaagcagggcgacggccggggtctggtgcttcctggctacaagtacctcggacccttcaacggactcgacaagggggagcccgtcaacgcggcggacgcagcggccctcgagcacgacaaggcctacgaccagcagctcaaagcgggtgacaatccgtacctgcggtataaccacgccgacgccgagtttcaggagcgtctgcaagaagatacgtcttttgggggcaacctcgggcgagcagtcttccaggccaagaagcgggttctcgaaccttttggtctggttgaggaaggcgctaagacggctcctggaaagaaacgtccggtagagcagtcgccacaagagccagactcctcctcgggcatcggcaagacaggccagcagcccgctaaaaagagactcaattttggtcagactggcgactcagagtcagtccccgacccacaacctctcggagaacctccagcaacccccgctgctgtgggacctactacaatggcttcaggcggtggcgcaccaatggcagacaataacgaaggcgccgacggagtgggtaatgcctcaggaaattggcattgcgattccacatggctgggcgacagagtcatcaccaccaacactcgcacctgggccttgcccacctacaataaccacctctacaagcaaatctccagtgcttcaacgggggccagcaacgacaaccactacttcggctacagcaccccctgggggtattttgatttcaacagattccactgccacttttcaccacgtgactggcagcgactcatcaacaacaattggggattccggcccaagagactcaacttcaagctcttcaacatccaagtcaaggaggtcacgacgaacgatggcgtcacgaccatcgctaataaccttaccagcacggttcaagtcttctcggattcagagtaccaactgccgtacgtcctcggctctgcgcaccagggctgcctccctccgttcccggcggacgtgttcatgattccgcagtacggctacctaacgctcaacaatggcagccaggccgtgggacgttcatccttttactgcctggaatatttcccttctcagatgctgagaacgggcaacaactttaccttcagctacacctttgaggaagtgcctttccacagcagttacgggcacagccagagcctggaccggctgatgaatcttctcatcgaccaatacctgtattacctgaacagaactcaaaatcagtccggaagtgcccaaaacaaggacttgctgtttagccgtgggtctccagctggcatgtttgttcagcccaaaaactggctacctggaccctgttatcggcagcagcgcgtttctaaaacaaaaacagacaacaacaacagcaattttacctggactggtgcttcaaaatataacctcaatgggcgtgaatccatcatcaaccctggcactgctatggcctcacacaaagacgacgaagacaagttctttcccatgagcggtgtcatgatttttggaaaagagagcgccggagcttcaaatactgcattggacaatgtcatgatcacagatgaagaggaaattaaagccactaaccctgtggccaccgaaagatttgggaccgtggcagtcaatttccagagcagcagcacagaccccgcgaccggagatgtgcatgttatgggagccttacctggcatggtgtggcaagacagagacgtatacctgcagggtcccatttgggccaaaattcctcacacggatggacactttcacccgtctcctctcatgggcggctttggacttaagcacccgcctcctcaaatcctcatcaaaaacacgcctgttcctgcgaatcctccggcagagttttcggctacaaagtttgcttcattcatcacccagtactccacaggacaagtgagtgtggaaattgaatgggagctgcagaaagaaaacagcaagcgctggaatcccgaagtgcagtacacatccaattatgcaaaatctgccaacgttgatttcactgtggacaacaatggactttatactgagcctcgccccattggcacccgttaccttacccgtcccttg

SEQ ID NO: 679 - DNA, 2208 bp, Artificial Sequence
  source: /note="Description of Artificial Sequence: Synthetic polynucleotide"
atggctgccgatggttatcttccagattggctcgaggacaacctctctgagggcattcgcgagtggtgggacttgaaacctggagccccgaaacctaaagccaaccagcaaaagcaggacgacggccggggtctggtgcttcctggctacaagtacctcggacccttcaacggactcgacaagggggagcccgtcaacgcggcggacgcagcggccctcgagcacgacaaggcctacgaccagcagctcaaagcgggtgacaatccgtacctgcggtataaccacgccgacgccgagtttcaggagcgtctgcaagaagatacgtcttttgggggcaacctcgggcgagcagtcttccaggccaagaagcgggttctcgaaccttttggtctggttgaggaaggcgctaagacggctcctggaaagaaacgtccggtagagcagtcgccacaagagccagactcctcctcgggcatcggcaagacaggccagcagcccgctaaaaagagactcaattttggtcagactggcgactcagagtcagtccccgacccacaacctctcggagaacctccagcaacccccgctgctgtgggacctactacaatggcttcaggcggtggcgcaccaatggcagacaataacgaaggcgccgacggagtgggtaatgcctcaggaaattggcattgcgattccacatggctgggcgacagagtcatcaccaccaacacccgcacctgggccttgcccacctacaataaccacctctacaagcaaatctccagtgcttcaacgggggccagcaacgacaaccactacttcggctacagcaccccctgggggtattttgatttcaacagattccactgccacttttcaccacgtgactggcagcgactcatcaacaacaattggggattccggcccaagagactcaacttcaagctcttcaacatccaagtcaaggaggtcacgacgaacgatggcgtcacgaccatcgctaataaccttaccagcacggttcaagtcttctcggattcagagtaccaactgccgtacgtcctcggctctgcgcaccagggctgcctccctccgttcccggcggacgtgttcatgattccgcagtacggctacctaatgctcaacaatggcagccaggccgtgggacgttcatccttttactgcctggaatatttcccttctcagatgctgagaacgggcaacaactttaccttcagctacacctttgaggaagtgcctttccacagcagctacgcgcacagccagagcctggaccggctgatgaatcctctcatcgaccaatacctgtattacctgaacagaactcaaaatcagtccggaagtgcccaaaacaaggacttgctgtttagccgtgggtctccagctggcatgtctgttcagcccaaaaactggctacctggaccctgttatcggcagcagcgcgtttctaaaacaaaaacagacaacaacaacagcaattttacctggactggtgcttcaaaatataacctcaatgggcgtgaatccatcatcaaccctggcactgctatggcctcacacaaagacgacgaagacaagttctttcccatgagcggtgtcatgatttttggaaaagagagcgccggagcttcaaatactgcattggacaatgtcatgatcacagatgaagaggaaattaaagccactaaccctgcggccaccgaaagatttgggaccgtggcagtcaatttccagagcagcagcacagaccccgcgaccggagatgtgcatgttatgggagccttacctggcatggtgtggcaagacagagacgtatacctgcagggtcccatttgggccaaaattcctcacacggatggacactttcacccgtctcctctcatgggcggctttggacttaagcacccgcctcctcaaatcctcatcaaaaacacgcctgttcctgcgaatcctccggcagagttttcggctacaaagtttgcttcattcatcacccagtactccacaggacaagtgagtgtggaaattgaatgggagctgcagaaagaaaacagcaagcgctggaatcccgaagtgcagtacacatccaattatgcaaaatctgccaacgttgatttcactgtggacaacaatggactttatactgagcctcgccccattggcacccgttaccttacccgtcccttg

SEQ ID NO: 680 - DNA, 2208 bp, Artificial Sequence
  source: /note="Description of Artificial Sequence: Synthetic polynucleotide"
atggctgccgatggttatcttccagattggctcgaggacaacctctctgagggcattcgcgagtggtgggacttgaaacctggagccccgaaacctaaagccaaccagcaaaagcaggacgacggccggggtctggtgcttcctggctacaagtacctcggacccttcaacggactcgacaagggggagcccgtcaacgcggcggacgcagcggccctcgagcacgacaaggcctacgaccagcagctcaaagcgggtgacaatccgtacctgcggtataaccacgccgacgccgagtttcaggagcgtctgcaagaagatacgtcttttgggggcaacctcgggcgagcagtcttccaggccaagaagcgggttctcgaaccttttggtctggttgaggaaggcgctaagacggctcctggaaagaaacgtccggtagagcagtcgccacaagagccagactcctcctcgggcatcggcaagacgggccagcagcccgctaaaaagagactcaattttggtcagactggcgactcagagtcagtccccgacccacaacctctcggagaacctccagcaacccccgctgctgtgggacctactacaatggcttcaggcggtggcgcaccaatggcagacaataacgaaggcgccgacggagtgggtaatgcctcaggaaattggcattgcgattccacatggctgggcgacagagtcatcaccaccagcacccgcacctgggccttgcccacctacaataaccacctctacaagcaaatctccagtgcttcaacgggggccagcaacgacaaccactacttcggctacagcaccccctgggggtattttgatttcaacagattccactgccacttttcaccacgtgactggcagcgactcatcaacaacaattggggattccggcccaagagactcaacttcaagctcttcaacatccaagtcaaggaggtcacgacgaacgatggcgtcacgaccatcgctaataaccttaccagcacggttcaagtcttctcggattcagagtaccaactgccgtacgtcctcggctctgcgcaccagggctgcctccctccgttcccggcggacgtgttcatgattccgcagtacggctacctaacgctcaacaatggcagccaggccgtgggacgttcatccttttactgcctggaatatttcccttctcagatgctgagaacgggcaacaactttaccttcagctacacctttgaggaagtgcctttccacagcagctacgcgcacagccagagcctggaccggctgatgaatcctctcatcgaccaatacctgtattacctgaacagaactcaaaatcagtccggaagtgcccaaaacaaggacttgctgtttagccgtgggtctccagctggcatgtccgttcagcccaaaaactggctacctggaccctgttatcggcagcagcgcgtttctaaaacaaaaacagacaacaacaacagcaattttacctggactggtgcttcaaaatataacctcaatgggcgtgaatccatcatcaaccctggcactgctatggcctcacacaaagacgacgaagacaagttctttcccatgagcggtgtcatgatttttggaaaagagagcgccggagcttcaaatactgcattggacaatgtcatgatcacagatgaagaggaaattaaagccactaaccctgtggccaccgaaagatttgggaccgtggcagtcaatttccagagcagcagcacagaccccgcgaccggagatgtgcatgttatgggagccttacctggcatggtgtggcaagacagagacgtatacctgcagggtcccatttgggccaaaattcctcacacggatggacactttcacccgtctcctctcatgggcggctttggacttaagcacccgcctcctcaaatcctcatcaaaaacacgcctgttcctgcgaatcctccggcagagttttcggctacaaagtttgcttcattcatcacccagtactccacaggacaagtgagtgtggaaattgaatgggagctgcagaaagaaaacagcaagcgctggaatcccgaagtgcagtacacatccaattatgcaaaatctgccaacgttgatttcactgtggacaacaatggactttatactgagcctcgccccattggcacccgttaccttacccgtcccttg

SEQ ID NO: 681 - DNA, 2208 bp, Artificial Sequence
  source: /note="Description of Artificial Sequence: Synthetic polynucleotide"
  modified_base (305)..(305): a, c, t, or g
atggctgccgatggttatcttccagattggctcgaggacaacctctctgagggcattcgcgagtggtgggacttgaaacctggagccccgaaacctaaagccaaccagcaaaagcaggacgacggccggggtctggtgcttcctggctacaagtacctcggacccttcaacggactcgacaagggggagcccgtcaacgcggcggacgcagcggccctcgagcacgacaaggcctacgaccagcagctcaaagcgggtgacaatccgtacctgcggtataaccacgccgacgccgagtttcaggngcgtctgcaagaagatacgtcttttgggggcaacctcgggcgagcagtcttccaggccaagaagcgggttctcgaaccttttggtctggttgaggaaggcgctaagacggctcctggaaagaaacgtccggtagagcagtcgccacaagagccagactcctcctcgggcatcggcaagacaggccagcagcccgctaaaaagagactcaattttggtcagactggcgactcagagtcagtccccgacccacaacctctcggagaacctccagcaacccccgctgctgtgggacctactacaatggcttcaggcggtggcgcaccaatggcagacaataacgaaggcgccgacggagtgggtaatgcctcaggaaattggcattgcgattccacatggctgggcggcagagtcatcaccaccagcacccgcacctgggccttgcccacctacaataaccacctctacaagcaaatctccagtgcttcaacgggggccagcaacgacaaccactacttcggccacagcaccccctgggggtattttgatttcaacagattccactgccacttttcaccacgtgactggcagcgactcatcaacaacaattggggattccggcccaagagactcaacttcaagctcttcaacatccaagtcaaggaggtcacgacgaacgatggcgtcacgaccatcgctaataaccttaccagcacggttcaagtcttctcggattcagagtaccaactgccgtacgtcctcggctctgcgcaccagggctgcctccctccgtccccggcggacgtgttcatgattccgcagtacggctacctaacactcaacaatggcagccaggccgtgggacgttcatccttttactgcctggaatatttcccttctcagatgctgagaacgggcaacaactttaccttcagctacacctttgaggaagtgcctttccacagcagctacgcgcacagccagagcctggaccggctgatgaatcctctcatcgaccaatacctgtattacctgaacagaactcaaaatcagtccggaagtgcccaaaacaaggacttgctgtttagccgtgggtctccagctggcatgtctgttcagcccaaaaactggctacctggaccctgttatcggcagcagcgcgtttctaaaacaaaaacagacaacaacaacagcaattttacctggactggtgcttcaaaatataacctcaatgggcgtgaatccatcatcaaccctggcactgctatggcctcacacaaagacgacaaagacaagttctttcccatgagcggtgtcatgatttttggaaaagagagcgccggagcttcaaatactgcattggacaatgtcatgatcacagatgaagaggaaattaaagccactaaccctgtggccaccgaaagatttgggaccgtggcagtcaatttccagagcagcaacacagaccccgcgaccggagatgtgcatgttatgggagccttacctggcatggtgtggcaagacagagacgtatacctgcagggtcccatttgggccaaaattcctcacacggatggacactttcacccgtctcctctcatgggcggctttggacttaagcacccgcctcctcaaatcctcatcaaaaacacgcctgttcctgcgaatcctccggcagagttttcggctacaaagtttgcttcattcatcacccagtactccacaggacaagtgagtgtggaaattgaatgggagctgcagaaagaaaacagcaagcgctggaatcccgaagtgcagtacacatccaattatgcaaaatctgccaacgttgatttcactgtggacaacaatggactttatactgagcctcgccccattggcacccgttaccttacccgtcccttg

SEQ ID NO: 682 - DNA, 2208 bp, Artificial Sequence
  source: /note="Description of Artificial Sequence: Synthetic polynucleotide"
atggctgccgatggttattttccagattggctcgaggacaacctttctgagggcattcgcgagtggtgggacttgaaacctggagccccgaaacctaaagccaaccagcaaaagcaggacgacggccggggtctggtgcttcctggctacaagtacctcggacccttcaacggactcgacaagggggagcccgtcaacgcggcggacgcagcggccctcgagcacgacaaggcctacgaccagcagctcaaagcgggtgacaatccgtacctgcggtataaccacgccgacgccgagtttcaggagcgtctgcaagaagatacgtcttttgggggcaacctcgggcgagcagtcttccaggccaagaagcgggttctcgaaccttttggtctggttgaggaaggcgctaagacggctcctggaaagaaacgtccggtagagcagtcgccacaagagccagactcctcctcgggcatcggcaggacaggccagcagcccgctaaaaagagactcaattttggtcagactggcgactcagagtcagtccccgacccacaacctctcggagaacctccagcgacccccgctgctgtgggacctactacaatggcttcaggcggtggcgcaccaatggcagacaataacgaaggtgccgacggagtgggtaatgcctcaggaaattggcattgcgattccacatggctgggcgacagagtcatcaccaccagcacccgcacctgggccttgcccacctacaataaccacctctacaagcaaatctccagtgcttcaacgggggccagcaacgacaaccactacttcggctacagcaccccctgggggtattttgatttcaacagattccactgccacttttcaccacgtgactggcagcgactcatcaacaacaattggggattccggcccaagagactcaacttcaagctcttcaacatccaagtcaaggaggtcacgacgaacgatggcgtcacgaccatcgctaataaccttaccagcacggttcaagtcttctcggattcagagtaccaactgccgtacgtcctcggctctgcgcaccagggctgcctccctccgttcccggcggacgtgttcatgattccgcagtacggctacctaacgctcaacaatggcagccaggccgtgggacgttcatccttttactgcctggaatatttcccttctcagatgctgagaacgggcaacaactttaccttcagctacacctttgaggaagtgcctttccacagcagctacgcgcacagccagagcctggaccggctgatgaatcctctcatcgaccaatacctgtattacctgaacagaactcaaaatcagtccggaagtgcccaaaacaaggacttgctgtttagccgtgggtctccagctggcatgtctgttcagcccaaaaactggctacctggaccctgttatcggcagcagcgcgtttctaaaacaaaaacagacaacaacaacagcaattttacctggactggtgcttcaaaatataacctcaatgggcgtgaatccatcatcaaccctggcactgctatggcctcacacaaagacgacgaagacaagttctttcccatgagcggtgtcatgatttttggaaaagagagcgccggagcttcaaatactgcattggacaatgtcatgatcacagatgaagaggaaattaaagccactaaccctgtggccaccgaaagatttgggaccgtggcagtcaatttccagagcagcagcccagaccccgcgaccggagatgtgcatgttatgggagccttacctggcatggtgtggcaagacagagacgtatacctgcagggtcccatttgggccaaaattcctcacacggatggacactttcacccgtctcctctcatgggcggctttggacttaagcacccgcctcctcaaatcctcatcaaaaacacgcctgttcctgcgaatcctccggcagagttttcggctacaaagtttgcttcattcatcacccagtactccacaggacaagtgagtgtggaaattgaatgggagctgcagaaagaaaacagcaagcgctggaatcccgaagtgcagtacacatccaattatgcaaaatctgccaacgttgatttcactgtggacaacaatggactttatagtgagcctcgccccattggcacccgttaccttacccgtcccttg

SEQ ID NO: 683 - DNA, 2208 bp, Artificial Sequence
  source: /note="Description of Artificial Sequence: Synthetic polynucleotide"
atggctgccgatggttatcttccagattggctcgaggacaacctctctgagggcattcgcgagtggtgggacttgaaacctggagccccgaaacctaaagccaaccagcaaaagcaggacgacggccggggtctggtgcttcctggctacaagtacctcggacccttcaacggactcgacaagggggagcccgtcaacgcggcggacgcagcggccctcgagcacgacaaggcctacgaccagcagctcaaagcgggtgacaatccgtacctgcggtataaccacgccgacgccgagtttcaggagcgtctgcaagaagatacgtcttttgggggcaacctcgggcgagcagtcttccaggccaagaagcgggttctcgaaccttttggtctggttgaggaaggcgctaagacggctcctggaaagaaacgtccggtagagcagtcgccacaagagccagactcctcctcgggcatcggcaagacaggccagcagcccgctaaaaagagactcaattttggtcagactggcgactcagagtcagtccccgacccacaacctctcggagaacctccagcaacccccgctgctgtgggacctactacaatggcttcaggcggtggcgcaccaatggcagacaataacgaaggcgccgacggagtgggtaatgcctcaggaaattggcattgcgattccacatggctgggcgacagagtcatcaccaccagcacccgcacctgggccttgcccacctacaataaccacctctacaagcaaacctccagtgcttcaacgggggccagcaacgacaaccactacttcggctacagcaccccctgggggtattttgatttcaacagattccactgccacttttcaccacgtgactggcagcgactcatcaacaacaattggggattccggcccaagagactcaacttcaagctcttcaacatccaagtcaaggaggtcacgacgaacgatggcgtcacgaccatcgctaataaccttaccagcacggttcaagtcttctcggattcagagtaccaactgccgtacgtcctcggctctgcgcaccagggctgcctccctccgttcccggcggacgtgttcatgattccgcagtacggctacctaacgctcaacaatggcagccaggccgtgggacgttcatccttttactgcctggaatatttcccttctcagatgctgagaacgggcaacaactttaccttcagctacacctttgaggaagtgcctttccacagcagctacgcgcacagccagagcctggaccggctgatgaatcctctcatcgaccaatacctgtattacctgaacagaactcaaaatcagtccggaagtgcccaaaacaaggacttgctgtttagccgtgggtctccagctggcatgtctgttcagcccaaaaactggctacctggaccctgttatcggcagcagcgcgtttctaaaacaaaaacagactacaacaacagcaattttacctggactggtgcttcaaaatataacctcaatgggcgtgaatccatcatcaaccctggcactgctatggcctcacacaaagacgacgaagacaagttctttcccatgagcggtgtcatgatttttggaaaagagagcgccggagcttcaaatactgcattggacaatgtcatgatcacagatgaagaggaaattaaagccactaaccctgtggccaccgaaagatttgggaccgtggcagtcaatttccagagcagcagcacagaccccgcgaccggagatgtgcatgttatgggagccttacctggcatggtgtggcaagacagagacgtatacctgcagggtcccatttgggccaaaattcctcacacggatggacactttcacccgtctcctctcatgggcggctttggacttaagcacccgcctcctcaaatcctcatcaaaaacacgcctgttcctgcgaatcctccggcagagttttcggctacaaagtttgcttcattcatcacccagtactccacaggacaagtgagtgtggaaattgaatgggagctgcagaaagaaaacagcaagcgctggaatcccgaagtgcagtacacatccaattatgcaaaatctgccaacgttgatttcactgtggacaacaatggactttatactgagcctcgccccattggcacccgttaccttacccgtcccttg

SEQ ID NO: 684 - DNA, 2208 bp, Artificial Sequence
  source: /note="Description of Artificial Sequence: Synthetic polynucleotide"
atggctgccgatggttatcctccagattggctcgaggacaacctctctgagggcattcgcgagtggtgggacttgaaacctggagtcccgaaacctaaagccaaccagcaaaagcaggacgacggccggggtctggtgcttcctggctacaagtacctcggacccttcaacggactcgacaagggggagcccgtcaacgcggcggacgcagcggccctcgagcacgacaaggcctacgaccagcagctcaaagcgggtgacaatccgtacctgcggtataaccacgccgacgccgagtttcaggagcgtctgcaagaagatacgtcttttgggggcaacctcgggcgagcagtcttccaggccaagaagcgggttctcgaaccttttggtctggttgaggaaggcgctaagacggctcctggaaagaaacgtccggtagagcagtcgccacaagagccagactcctcctcgggcatcggcaagacaggccagcagcccgctaaaaagagactcaattttggtcagactggcgactcagagtcagtccccgacccacaacctctcggagaacctccagcaacccccgctgctgtgggacctactacaatggcttcaggcggtggcgcaccaatggcagacaataacgaaggcgccgacggagtgggtaatgcctcaggaaattggcattgcgattccacatggctgggcgacagagtcatcaccaccagcacccgcacctgggccttgcccacctacaataaccacctctacaagcaaatctccagtgcttcaacgggggccagcaacgacaaccactacttcggctacagcaccccctgggggtattttgatttcaacagattccactgccacttttcaccacgtgactggcagcgactcatcaacaacaattggggattccggcccaagagactcaacttcaagctcttcaacatccaagtcaaggaggtcacgacgaacgatggcgtcacgaccatcgctaataaccttaccagcacggttcaagtcttctcggattcagagtaccaactgccgtacgtcctcggctctgcgcaccagggctgcctccctccgttcccggcggacgtgttcatgattccgcagtacggctacctaacgctcaacaatggcagccaggccgtgggacgttcatccttttactgcctggaatatttcccttctcagatgctgagaacgggcaacaactttaccttcagctacacctttgaggaagtgcctttccacagcagctacgcgcacagccagagcctggaccggctgatgaatcctctcatcgaccaatacctgtattacctgaacagaactcaaaatcagtccggaagtgcccaaaacaaggacttgctgtttagccgtgggtctccagctggcatgtctgttcagcccaaaaactggctacctggaccctgttatcggcagcagcgcgtttctaaaacaaaaacagacaacaacaacagcaattttacctggactggtgcttcaaaatataacctcaatgggcgtgaatccatcatcaaccctggcactgctatggcctcacacaaagacgacgaagacaagttctttcccatgagcggtgtcatgatttttggaaaagagagcgccggagcttcaaatactgcattggacaatgtcatgatcacagatgaagaggaaattaaagccactaaccctgtggccaccgaaagatttgggaccgtggcagtcaatttccagagcagcagcacagaccccgcgaccggagatgtgcatgttatgggagccttacctggcatggtgtggcaagacagagacgtatacctgcagggtcccatttgggccaaaattcctcacacggatggacactttcacccgtctcctctcatgggcggctttggacttaagcacccgcctcctcaaatcctcatcaaaaacacgcctgttcctgcgaatcctccggcagagttttcggctacaaagtttgcttcattcatcacccagtactccacaggacaagtgagtgtggaaattgaatgggagctgcagaaagaaaacagcaagcgctggaatcccgaagtgcagtacacatccaattatgcaaaatctgccaacgttgatttcactgtggacaacaatggactttatactgagcctcgccccattggcacccgttaccttacccgtcccttg

SEQ ID NO: 685 - DNA, 2196 bp, Artificial Sequence
  source: /note="Description of Artificial Sequence: Synthetic polynucleotide"
atggctgccgatggttatcttccagattggctcgaggacaacctctctgagggcattcgcgagtggtgggacttgaaacctggagccccgaaacctaaagccaaccagcaaaagcaggacgacggccggggtctggtgcttcctggctacaagtacctcggacccttcaacggactcgacaagggggagcccgtcaacgcggcggacgcagcggccctcgagcacgacaaggcctacgaccagcagctcaaagcgggtgacaatccgtacctgcggtataaccacgccgacgccgagtttcaggagcgtctgcaagaagatacgtcttttgggggcaacctcgggcgagcagtcttccaggccaagaagcgggttctcgaaccttttggtctggttgaggaaggcgctaagacggctcctggaaagaaacgtccggtagagcagtcgccacaagagccagactcctcctcgggcatcggcaagacaggccagcagcccgctaaaaagagactcaattttggtcagactggcgactcagagtcagtccccgacccacaacctctcggagaacctccagcaacccccgctgctgtgggacctactacaatggcttcaggcggtggcgcaccaatggcagacaataacgaaggcgccgacggagtgggtaatgcctcaggaaattggcattgcgattccacatggctgggcgacagagtcatcaccaccagcacccgcacctgggccttgcccacctacaataaccacctctacaagcaaatctccagtgcttcaacgggggccagcaacgacaaccactacttcggctacagcaccccctgggggtattttgatttcaacagattccactgccacttttcaccacgtgactggcagcgactcatcaacaacaattggggattccggcccaagagactcaacttcaagctcttcaacatccaagtcaaggaggtcacgacgaacgatggcgtcacgaccatcgctaataaccttaccagcacggttcaagccttctcggattcagagtaccaactgccgtacgtcctcggctctgcgcaccagggctgcctccctccgttcccggcggacgtgttcatgattccgcagtacggctacctaacgctcaacaatggcagccaggccgtgggacgttcatccttttactgcctggaatatttcccttctcagatgctgagaacgggcaacaactttaccttcagctacacctttgaggaagtgcctttccacagcagctacgcgcacagccagagcctggaccggctgatgaatcctctcatcgacccatacctgtattacctgaacagaactcaaaatcagtccggaagtgcccaaaacaaggacttgctgtttagccgtgggtctccagctggcatgtctgttcagcccaaaaactggctacctggaccctgttatcggcagcagcgcgtttctaaaacaaaaacagacaacaacaacagcaattttacctggactggtgcttcaaaatataacctcaatgggcgtgaatccatcatcaaccctggcactgctatggcctcacacaaagacgacgaagacaagttctttcccatgagcggtgtcatgatttttggaaaagagagcgccggagcttcaaatactgcattggacaatgtcatgatcacagatgaagaggaaattaaagccactaaccctgtggccaccgaaagatttgggaccgtggcagtcaatttccagagcagcagcacagaccccgcgaccggagatgtgcatgttatgggagccttacctggcatggtgtggcaagacagagacgtatacctgcagggtcccatttgggccaaaattcctcacacggatggacactttcacccgtctcctctcatgggcggctttggacttaagcacccgcctcctcaaatcctcatcaaaaacacgcctgttcctgcgaatcctccggcagagttttcggctacaaagtttgcttcattcatcacccagtactccacaggacaagtgagtgtggaaattgaatgggagctgcagaaagaaaacagcaagcgctggaatcccgaagtgcagtacacatccaattatgcaaaatctgccaacgttgatttcactgtggacaacaatggactttatactgagcctcgccccattggcacccgttacctt

SEQ ID NO: 686 - DNA, 2208 bp, Artificial Sequence
  source: /note="Description of Artificial Sequence: Synthetic polynucleotide"
atggctgccgatggttatcttccagattggctcgaggacaacctctctgagggcattcgcgagtggtgggacttgaaacctggagccccgaaacctaaagccaaccagcaaaagcaggacgacggccggggtctggtgcttcctggctacaagtacctcggacccttcaacggactcgacaagggggagcccgtcaacgcggcggacgcagcggccctcgagcacgacaaggcctacgaccagcagctcaaagcgggtgacaatccgtacctgcggtataaccacgccgacgccgagtttcaggagcgtctgcaagaagatacgtcttttgggggcaacctcgggcgagcagtcttccaggccaagaagcgggttctcgaaccttttggtctggttgaggaaggcgctaagacggctcctggaaagaaacgtccggtagagcagtcgccacaagagccagactcctcctcgggcatcggcaagacaggccagcagcccgctaaaaagagactcaattttggtcagactggcgactcagagtcagtccccgacccacaacctctcggagaacctccagcaacccccgctgctgtgggacctactacaatggcttcaggcggtggcgcaccaatggcagacaataacgaaggcgccgacggagtgggtaatgcctcaggaaattggcattgcgattccacatggctgggcgacagagtcatcaccaccagcacccgcacctgggccttgcccacctacaataaccacctctacaagcaaatctccagtgcttcaacgggggccagcaacgacaaccactacttcggctacagcaccccctgggggtattttgatttcaacagattccactgccacttttcaccacgtgactggcagcgactcatcaacaacaattggggattccggcccaagagactcaacttcaagctcttcaacatccaagtcaaggaggtcacgacgaacgatggcgtcacgaccatcgctaataaccttaccagcacggttcaagtcttctcggattcagagtaccaactgccgtacgtcctcggctctgcgcaccagggctgcctccctccgttcccggcggacgtgttcatgattccgcagtacggctacctaacgctcaacaatggcagccaggccgtgggacgttcatccttttactgcctggaatatttcccttctcagatgctgagaacgggcaacaactttaccttcagctacacctttgaggaagtgcctttccacagcagctacgcgcacagccagagcctggaccggctgatgaatcctctcatcgaccaatacctgtattacctgaacagaactcaaaatcagtccggaagtgcccaaaacaaggacttgctgtttagccgtgggtctccagctggcatgtctgttcagcccaaaaactggctacctggaccctgttatcggcagcagcgcgtttctaaaacaaaaacagacaacaacaacagcaattttacctggactggtgcttcaaaatataacctcaatgggcgtgaatccatcatcaaccctggcactgctatggcctcacacaaagacgacgaagacaagttctttcccatgagcggtgtcatgatttttggaaaagagagcgccggagcttcaaatactgcattggacaatgtcatgatcacagatgaagaggaaattaaagccactaaccctgtggccaccgaaagatttgggaccgtggcagtcaatttccagagcagcagcacagaccccgcgaccggagatgtgcatgttatgggagccttacctggcatggtgtggcaagacagagacgtatacctgcagggtcccatttgggccaaaattcctcacacggatggacactctcacccgtctcctctcatgggcggctttggacttaagcacccgcctcctcaaatcctcatcaaaaacacgcctgttcctgcgaatcctccggcagagttttcggctacaaagtttgcttcattcatcacccagtactccacaggacaagtgagtgtggaaattgaatgggagctgcagaaagaaaacagcaagcgctggaatcccgaagtgcagtacacatccaattatgcaaaatctgccaacgttgatttcactgtggacaacaatggactttatactgagcctcgccccattggcacccgttaccttacccgtcccttg

SEQ ID NO: 687 - DNA, 2208 bp, Artificial Sequence
  source: /note="Description of Artificial Sequence: Synthetic polynucleotide"
atggctgccgatggttatcttccagattggctcgaggacaacctctctgagggcattcgcgagtggtgggacttgaaacctggagccccgaaacctaaagccaaccagcaaaagcaggacgacggccggggtctggtgcttcctggctacaagtacctcggacccttcaacggactcgacaagggggagcccgtcaacgcggcggacgcagcggccctcgagcacgacaaggcctacgaccagcagctcaaagcgggtgacaatccgtacctgcggtataaccacgccgacgccgagtttcaggagcgtctgcaagaagatacgtcttttgggggcaacctcgggcgagcagtcttccaggccaagaagcgggttctcgaaccttttggtctggttgaggaaggcgctaagacggctcctggaaagaaacgtccggtagagcagtcgccacaagagccagactcctcctcgggcatcggcaagacaggccagcagcccgctaaaaagagactcaattttggtcagactggcgactcagagtcagtccccgacccacaacctctcggagaacctccagcaacccccgctgctgtgggacctactacaatggcttcaggcggtggcgcaccaatggcagacaataacgaaggcgccgacggagtgggtaatgcctcaggaaattggcattgcgattccacatggctgggcgacagagtcatcaccaccagcacccgcacctgggccttgcccacctacaataaccacctctacaagcaaatctccagtgcttcaacgggggccagcaacgacaaccactacttcggctacagcaccccctgggggtattttgatttcaacagattccactgccacttttcaccacgtgactggcagcgactcatcaacaacaattggggattccggcccaagagactcaacttcaagctcttcaacatccaagtcaaggaggtcacgacgaacgatggcgtcacgaccatcgctaataaccttaccagcacggttcaagtcttctcggattcagagtaccaactgccgtacgtcctcggctctgcgcaccagggctgcctccctccgttcccggcggacgtgttcatgattccgcagtacggctacctaacgctcaacaatggcagccaggccgtgggacgttcatccttttactgcctggaatatttcccttctcagatgctgagaacgggcaacaactttaccttcagctacacctttgaggaagtgcctttccacagcagctacgcgcacagccagagcctggaccggctgatgaatcctctcatcgacctatacctgtattacctgaacagaactcaaaatcagtccggaagtgcccaaaacaaggacttgctgtttagccgtgggtctccagctggcatgtctgttcagcccaaaaactggctacctggaccctgttatcggcagcagcgcgtttctaaaacaaaaacagacaacaacaacagcaattttacctggactggtgcttcaaaatataacctcaatgggcgtgaatccatcatcaaccctggcactgctatggcctcacacaaagacgacgaagacaagttctttcccatgagcggtgtcatgatttttggaaaagagagcgccggaacttcaaatactgcattggacaatgtcatgatcacagatgaagaggaaattaaagccactaaccctgtggccaccgaaagatttgggaccgtggcagtcaatttccagagcagcagcacagaccccgcgaccggagatgtgcatgttatgggagccttacctggcatggtgtggcaagacagagacgtatacctgcagggtcccatttgggccaaaattcctcacacggatggacactttcacccgtctcctctcatgggcggctttggacttaagcacccgcctcctcaaatcctcatcaaaaacacgcctgttcctgcgaatcctccggcagagttttcggctacaaagtttgcttcattcatcacccagtactccacaggacaagtgagtgtggaaattgaatgggagctgcagaaagaaaacagcaagcgctggaatcccgaagtgcagtacacatccaattatgcaaaatctgccaacgttgatttcactgtggacaacaatggactttatactgagcctcgccccattggcacccgttaccttacccgtcccttg

SEQ ID NO: 688 - DNA, 2208 bp, Artificial Sequence
  source: /note="Description of Artificial Sequence: Synthetic polynucleotide"
atggctgccgatggttatcttccagattggctcgaggacagcctctctgagggcattcgcgagtggtgggacttgaaacctggagccccgaaacctaaagccaaccagcaaaagcaggacgacggccggggtctggtgcttcctggctacaagtacctcggacccttcaacggactcgacaagggggagcccgtcaacgcggcggacgcagcggccctcgagcacgacaaggcctacgaccagcagctcaaagcgggtgacaatccgtacctgcggtataaccacgccgacgccgagtttcaggagcgtctgcaagaagatacgtcttttgggggcaacctcgggcgagcagtcttccaggccaagaagcgggttctcgaaccttttggtctggttgaggaaggcgctaagacggctcctggaaagaaacgtccggtagagcagtcgccacaagagccagactcctcctcgggcatcggcaagacaggccagcagcccgctaaaaagagactcaattttggtcagactggcgactcagagtcagtccccgacccacaacctctcggagaacctccagcaacccccgctgctgtgggacctactacgatggcttcaggcggtggcgcaccaatggcagacaataacgaaggcgccgacggagtgggtaatgcctcaggaaattggcattgcgattccacatggctgggcgacagagtcatcaccaccagcacccgcacctgggccttgcccacctacaataaccacctctacaagcaaatctccagtgcttcaacgggggccagcaacgacaaccactacttcggctacagcaccccctgggggtattttgatttcaacagattccactgccacttttcaccacgtgactggcagcgactcatcaacaacaattggggattccggcccaagagactcaacttcaagctcttcaacatccaagtcaaggaggtcacgacgaacgatggcgtcacgaccatcgctaataaccttaccagcacggttcaagtcttctcggattcagagtaccaactgccgtacgtcctcggctctgcgcaccagggctgcctccctccgttcccggcggacgtgttcatgattccgcagtacggctacctaacgcccaacaatggcagccaggccgtgggacgttcatccttttactgcctggaatatttcccttctcagatgctgagaacgggcaacaactttaccttcagctacacctttgaggaagtgcctttccacagcagctacgcgcacagccagagcctggaccggctgatgaatcctctcatcgaccaataccagtattacctgaacagaactcaaaatcagtccggaagtgcccaaaacaaggacttgctgtttagccgtgggtctccagctggcatgtctgttcagcccaaaaactggctacctggaccctgttatcggcagcagcgcgtttctaaaacaaaaacagacaacaacaacagcaattttacctggactggtgcttcaaaatataacctcaatgggcgtgaatccatcatcaaccctggcactgctatggcctcacacaaagacgacgaagacaagttctttcccatgagcggtgtcatgatttttggaaaagagagcgccggagcttcaaatactgcattggacaatgtcatgatcacagatgaagaggaaattaaagccactaaccctgtggccaccgaaagatttgggaccgtggcagtcaatttccagagcagcagcacagaccccgcgaccggagatgtgcatgttatgggagccttacctggcatggtgtggcaagacagagacgtatacctgcagggtcccatttgggccaaaattcctcacacggatggacactttcacccgtctcctctcatgggcggctttggacttaagcacccgcctcctcaaatcctcatcaaaaacacgcctgttcctgcgaatcctccggcagagttttcggctacaaagtttgcttcattcatcacccagtactccacaggacaagtgagtgtggaaattgaatgggagctgcagaaagaaaacagcaagcgctggaatcccgaagtgcagtacacatccaattatgcaaaatctgccaacgttgatttcactgtggacaacaatggactttatactgagcctcgccccattggcacccgttaccttacccgtcccttg

SEQ ID NO: 689 - DNA, 2208 bp, Artificial Sequence; identical to SEQ ID NO: 680
  source: /note="Description of Artificial Sequence: Synthetic polynucleotide"

SEQ ID NO: 690 - DNA, 2205 bp, Artificial Sequence
  source: /note="Description of Artificial Sequence: Synthetic polynucleotide"
atggctgccgatggttatcttccagattggctcgaggacactctctctgaaggaataagacagtggtggaagctcaaacctggcccaccaccaccaaagcccgcagagcggcataaggacgacagcaggggtcttgtgcttcctgggtacaagtacctcggacccttcaacggactcgacaagggagagccggtcaacgaggcagacgccgcggccctcgagcacgacaaagcctacgaccggcagctcgacagcggagacaacccgtacctcaagtacaaccacgccgacgcggagtttcaggagcgccttaaagaagatacgtcttttgggggcaacctcggacgagcagtcttccaggcgaaaaagagggttcttgaacctctgggcctggttgaggaacctgttaagacggctccgggaaaaaagaggccggtagagcactctcctgtggagccagactcctcctcgggaaccggaaaggcgggccagcagcctgcaagaaaaagattgaattttggtcagactggagacgcagactcagtacctgacccccagcctctcggacagccaccagcagccccctctggtctgggaactaatacgatggctacaggcagtggcgcaccaatggcagacaataacgagggcgccgacggagtgggtaattcctcgggaaattggcattgcgattccacatggatgggcgacagagtcatcaccaccagcacccgaacctgggccctgcccacctacaacaaccacctctacaaacaaatttccagccaatcaggagcctcgaacgacaatcactactttggctacagcaccccttgggggtattttgacttcaacagattccactgccacttttcaccacgtgactggcaaagactcatcaacaacaactggggattccgacccaagagactcaacttcaagctctttaacattcaagtcaaagaggtcacgcagaatgacggtacgacgacgattgccaataaccttaccagcacggttcaggtgtttactgactcggagtaccagctcccgtacgtcctcggctcggcgcatcaaggatgcctcccgccgttcccagcagacgtcttcatggtgccacagtatggatacctcaccctgaacaacgggagtcaggcagtaggacgctcttcattttactgcctggagtactttccttctcagatgctgcgtaccggaaacaactttaccttcagctacacttttgaggacgttcctttccacagcagctacgctcacagccagagtctggaccgtctcatgaatcctctcatcgaccagtacctgtattacttgagcagaacaaacactccaagtggaaccaccacgcagtcaaggcttcagttttctcgggccggagcgagtgacattcgggaccagtctaggaactggcttcctggaccctgttaccgccagcagcgagtatcaaagacatctgcggataacaacaacagtgaatactcgtggactggagctaccaagtaccacctcaatggcagagactctctggtgaatccgggcccggccatggcaagccacaaggacgatgaagaaaagttttttcctcagagcggggttctcatctttgggaagcaaggctcagagaaaacaaatgtggacattgaaaaggtcatgattacagacgaagaggaaatcaggacaaccaatcccgtggctacggagcagtatggttctgtatctaccaacctccagagaggcaacagacaagcagctaccgcagatgtcaacacacaaggcgttcttccaggcatggtctggcaggacagagatgtgtaccttcaggggcccatctgggcaaagattccacacacggacggacattttcacccctctcccctcatgggtggattcggacttaaacaccctcctccacagattctcatcaagaacaccccggtacctgcgaatccttcgaccaccttcagtgcggcaaagtttgcttccttcatcacacagtactccacgggacaggtcagcgtggagatcgagtgggagctgcagaaggaaaacagcaaacgctggaatcccgaaattcagtacacttccaactacaacaagtctgttaatgtggactttactgtggacactaatggcgtgtattcagagcctcgccccattggcaccagatacctgactcgtaatctg

SEQ ID NO: 691 - protein, 736 aa, Artificial Sequence
  source: /note="Description of Artificial Sequence: Synthetic polypeptide"
MAADGYLPDWLEDNLSEGIREWWALKPGAPQPKANQQHQDNARGLVLPDYKYLGPGNGLDKGEPVNAADVAALEHDKAYDQQLKAGDNPYLKYNHADAEFQERLKEDTSFGGNLGRAVFQAKKRLLEPLGLVEEAAKTAPGKKRPVEQSPQEPDSSAGIGKSGAQPAKKRLNFGQTGDTESVPDPQPIGEPPAAPSGVGSLTMASGGGAPVADNNEGADGVGSSSGNWHCDSQWLGDGVITTSTRTWALPTYNNHLYKQISNSTSGGSSNDNAYFGYSTPWGYFDFNRFHCHFSPRDWQRLINNNWGFRPKRLNFKLFNIQVKEVTDNNGVKTIANNLTSTVQVFTDSDYQLPYVLGSAHEGCLPPFPADVFMIPQYGYLTLNDGSQAVGRSSFYCLEYFPSQMLRTGNNFQFSYEFENVPFHSSYAHSQSLDRLMNPLIDQYLHYLPKTINGSGQNQQTLKFSVAGPSNMAVQGRNYIPGPSYRQQRVSTTVTQNNNSEFAWPGASSWALNGRNSLMNPGPAMASYKEGEDSFFPLSGSLIFGKQGTGRDNVDADKVMITNEEEIKTTNPVATESYGQVATNHQSAQAQAQTGWVQNQGILPGMVWQDRDVYLQGPIWAKIPHTDGNFHPSPLMGGFGMKHPPPQTLIKNTPVPADPPTAFNKDKLNSFITQYSTGQVSVEIEWELQKENSKRWNPEIQYTSNYYKSNNVEFAVNTEGVYSEPRPIGTRYLTRNL

SEQ ID NO: 692 - protein, 736 aa, Artificial Sequence
  source: /note="Description of Artificial Sequence: Synthetic polypeptide"
MAADGYLPDWLEDNLSEGIREWWALKPGAPQPKANQQHQDNARGLVLPGYKYLGPGNGLDKGEPVNAADAAALEHDKAYDQQLKAGDNPYLKYNHADAEFQERLKEDTSFGGNLGRAVFQAKRRLLEPLGLVEEAAKTAPGKKRPVEQSPQEPDSSAGIGKSGAQPAKKRLNFGQTGDTESVPDPQPIGEPPAAPSGVGSLTMASGGGAPVADNNEGADGVGSSSGNWHCDSQWLGDRVITTSTRTWALPTYNNHLYKQISNSTSGGSSNDNAYFGYSTPWGYFDFNRFHCHFSPRDWQRLINNNWGFRPKRLNFKLFNIQIKEVTDNNGVKTIANNLTSTVQVFTDLDYQLPYVLGSAHEGCLPPFPADVFMIPQYGYLTLNDGSQAVGRSSFYCLEYFPSQMLRTGNNFQFSYEFENVPFHSSYAHSQSLDRLMNPLIDQYLHYLSKTINGSGQNQQTLKFSVAGPSNMAVQGRNYIPGPSYRQQRVSTTVTQNNNSEFAWPGASSWALNGRNSLMNPGPAMASYKEGEDSFFPLSGSLIFGKQGTGRDNVDADKVMITNEEEIKTTNPVATESYGQVATNHQSAQAQAQTGWVQNQGILPGMVWQDRDVYLQGPIWAKIPHTDGNFHPSPLMGGFGMKHPPPQTLIKNTPVPADPPTAFNKDKLNSFITQYSTGQVSVEIEWELQKENSKRWNPEIQYTSNYYKSNNVEFAVNTEGVYSEPRPIGTRYLTRNL

SEQ ID NO: 693 - protein, 736 aa, Artificial Sequence
  source: /note="Description of Artificial Sequence: Synthetic polypeptide"
MAADGYLPDWLEDNLSEGIREWWALKPGAPQPKANQQHQDNARGLVLPGYKYLGPGNGLDKGEPVSAADAAALEHDKAYDQQLKAGDNPYLKYNHADAEFQERLKEDTSFGGNLGRAVFQAKKRLLEPLGLVEEAAKTAPGKKRPVEQSPQEPDSSAGIGKSGAQPAKKRLNFGQTGDTESVSDPQPIGEPPAAPSGVGSLTMASGGGAPVADNNEGADGVGSSSGNWHCDSQWLGDRVITTSTRTWALPTYNNHLYKQISNSTSGGSSNDNAYFGYSTPWGYFDFNRFHCHFSPRDWQRLINNNWGFRPKRLNFKLFNIQVKEVTDNNGVKTIANNLTSTVQVFTDSDYQLPYVLGSAHEGCLPPSPADVFMIPQYGYLTLNDGSQAVGRSSFYCLEYFPSQMLRTGNNFQFSYEFENVPFHSSYAHSQSLDRLMNPLIDQYLHYLSKTINGSGQNQQTLKFSVAGPSNMAVQGRNYIPGPSYRQQRVSTTVTQNNNSEFAWPGASSWALNGRNSLMNPGPAMASYKEGEDSFFPLSGSLIFGKQGTGRDDVDADKVIITNEEEIKTTNPVATESYGQVATNHQSAQAQAQTGWVQNQGILPGMVWQDRDVYLQGPIWAKIPHTDGNFHPSPLMGGFGMKHPPPQTLIKNTPVPADPPTAFNKDKLNSFITQYSTGQVSVEIEWELQKENSKRWNPEIQYTSNYYKSNNVEFAVNTEGVYSEPRPIGTRYLTRNL

SEQ ID NO: 694 - protein, 736 aa, Artificial Sequence
  source: /note="Description of Artificial Sequence: Synthetic polypeptide"
MAADGYLPDWLEDNLSEGIREWWALKPGAPQPKANQQHQDNARGLVLPGYKYLGPGNGLDKGEPVNAADAAALEHDKAYDQQLKAGDNPYLKYNHAGAEFQERLKEDTSFGGNLGRAVFQAKKRLLEPLGLVEEAAKTAPGKKRPVEQSPQEPDSSAGIGKSGAQPAKKRLNFGQTGDTESVPDPQPIGEPPAAPSGVGSLTMASGGGAPVADNNEGAGGVGSSSGNWHCDSQWLGDRVVTTSTRTWALPTYNNHLYKQISNSTSGGSSNDNAYFGYSTPWGYFDFNRFHCHFSPRDWQRLINNNWGFRPKRLNFKLFNIQVKEVTDNNGVKTIANNLTSTVQVFTDSDYQLPYVLGSAHGGCLPPFPADVFMIPQYGYLTLNDGSQAVGRSSFYCLEYFPSQMLRTGNNFQFSYEFENVPFHSSYAHSQSLDRLMNPLIDQYLHYLSKTINGSGQNQQTLKFSVAGPSNMAVQGRSYIPGPSYRQQRVSTTVTQNNNSEFAWPGASSWALNGRNSLMNPGPAMASYKEGEDSFFPLSGSLIFGKQGTGRDNVDADKVMITNEEEIKTTNPVATESYGQVATNHQSAQAQAQTGWVQNQGILPGMVWQDRDVYLQGPIWAKIPHTDGNFHPSPLMGGFGMKHPPPQTLIKNTPVPADPPTAFNKDKLNSFITQYSTGQVSVEIEWELQKENSKRWNPEIQYTSNYYKSNNVEFAVNTEGVYSEPRPIGTRYLTRNL

SEQ ID NO: 695 - protein, 736 aa, Artificial Sequence
  source: /note="Description of Artificial Sequence: Synthetic polypeptide"
MAADGYLPDWLEDNLSEGIREWWALKPGAPQPKANQQHQDNARGLVLPGYKYLGPGNGLDKGEPVNAADAAALEHDKAYDQQLKAGDNPYLKYNHADAEFQERLKEDTSFGGNLGRAVFQAKKRLLEPLGLVEEAAKTAPGKKRPVEQSPQEPDSSAGIGKSGAQPAKKRLNFGQTGDTESVPDPQPIGEPPAAPSGVGSLTMASGGGAPVADNNEGADGVGSSSGNWHCDSQWLGDRVVTTSTRTWALPTYNNHLYKQISNSTSGGSSNDNAYFGYSTPWGYFDFNRFHCHFSPRDWQRLINNNWGFRPKRLNFKLFNIQVKEVTDNNGVKTIANNLTSTVQVFTDSDYQLPYVLGSAHEGCLPPFPADVFMIPQYGYLTLNDGSQAVGRSSFYCLEYFPSQMLRTGNNFQFSYEFENVPFHSSHAHSQSLDRLMNPLIDQYLHYLSKTINGSGQNQQTLKFSVAGHSNMAVQGRNYIPGPSYRQQRVSTTVTQNNNSEFAWPGASSWALNGRNSLMNPGPAMASYKEGEDSFFPLSGSLIFGKQGTGRDNVDADKVMITNEEEIKTTNPVATESYGQVATNHQSAQAQAQTGWVQNQGILPGMVWQDRDVYLQGPIWAKIPHTDGNFHPSPLMGGFGMKHPPPQTLIKNTPVPADPPTAFNKDKLNSFITQYSTGQVSVEIGWELQKENSKRWNPEIQYTSNYYKSNNVEFAVNTEGVYSEPRPIGTRYLTRNL

SEQ ID NO: 696 - protein, 736 aa, Artificial Sequence
  source: /note="Description of Artificial Sequence: Synthetic polypeptide"
MAADGYLPDWLEDNLSEGIREWWALKPGAPQPKANQQHQDNARGLVLPGYKYLGPGNGLDKGEPVNAADAAALEHDKAYDQQLKAGDNPYLKYNHADAEFQERLKEDTSFGGNLGRAVFQAKKRLLEPLGLVEEAAKTAPGKKRPVEQSPQEPDSSAGIGKSGAQPAKKRLNFGQTGDTESVPDPQPIGEPPAAPSGVGSLTMASGGGAPVADNNEGADGVGSSSGNWHCDSQWLGDRVITTSTRTWALPTYNNRLYKQISNSTSGGSSNDNAYFGYSTPWGYFDFNRFHCHFSPRDWQRLINNNWGFRPKRLNFKPFNIQVKEVTDNNGVKTIANNLTSTVQVFTDSDYQLPYVLGSAHEGCLPPFPADVFMIPQYGYLTLNDGSQAVGRSSFYCLEYFPSQMLRTGNNFQFSYEFENVPFHSSYAHSQSLDRLMNPLIDQYLHYLSKTINGSGQNQQTLKFSVAGPSNMAVQGRNYIPGPSYRQQRVSTTVTQNNNSEFAWPGASSWALNGRNSLMNPGPAMASYKEGEDSFFPLSGSLIFGKQGTGRDNVDADKVMITNEEEIKTTNPVATESYGQVATNHQSAQAQAQTGWVQNQGILPGMVWQDRDVYLQGPIWAKIPHTDGNFHPSPLMGGFGMKHPPPQTLIKNTPVPADPPTAFNKDKLNSFITQYSTGQVSVEIEWELQKENSKRWNPEIQYTSNYYKSNNVEFAVNTEGVYSEPRPIGTRYLTRNL

SEQ ID NO: 697 - protein, 736 aa, Artificial Sequence
  source: /note="Description of Artificial Sequence: Synthetic polypeptide"
MAADGYLPDWLEDNLSEGIREWWALKPGAPQPKANQQHQDNARGLVLPGYKYLGPGNGLDKGEPVNAADAAALEHDKAYDQQLKAGDNPYLKYNHADAEFQERLKEDTSFGGNLGRAVFQAKKRLLEPLGLVEEAAKTAPGKKRPVEQSPQEPDSSAGIGKSGAQPAKKRLNFGQTGDTESVPDPQPIGEPPAAPSGVGSLTMASGGGAPVADNNEGADGVGSSSGNWHCDSQWLGDRVITTSTRTWALPTYNNHLYKQISNSTSGGSSNDNAYFGYSTPWGYFDFNRFHCHFSPRDWQRLINNNWGFRPKRLNFKLFNIQVKEVTDNNGVKTIANNLTSTVQVFTDSDYQLPYVLGSAHEGCLPPFPADVFMIPQYGYLTLNDGSQAVGRSSFYCLEYFPSQMLRTGNNFQFSYEFENVPFHSSYAHSQSLDRLMNPLIDQYLHYLSKTINGSGQNQQTLKFSVAGPSNMAVQGRNYIPGPSYRQQRVSTTVTQNNNSEFAWPGASSWALNGRNSLMNPGPAMASYKEGEDSFFPLSGSLIFGKQGTGRDNVDADKVMITNEEEIKTTNPVATESYGQVATNHQSAQAQAQTGWVQNQGILPGMVWQDRDVYLQGPIWAKIPHTDGNFHPSPLMGGFGMKHPPPQTLIKNTPVPADPPTAFNKDKLNSFITQYSTGQVSVEIEWELQKENSKRWNPEIQYTSNYYKSNNVEFAVNTEGVYSEPRPIGTRYLTRNL

SEQ ID NO: 698 - protein, 736 aa, Artificial Sequence; identical to SEQ ID NO: 697
  source: /note="Description of Artificial Sequence: Synthetic polypeptide"

SEQ ID NO: 699 - protein, 736 aa, Artificial Sequence
  source: /note="Description of Artificial Sequence: Synthetic polypeptide"
MAADGYLPDWLEDNLSEGIREWWDLKPGAPKPKANQQKQDDGRGLVLPGYKYLGPFNGLDKGEPVNAADAAALEHDKAYDQQLKAGDNPYLRYNHADAEFQERLQEDTSFGGNLGRAVFQAKKRVLEPFGLVEEGAKTAPGKKRPVEQSPQEPDSSSGIGKSGQQPAKKRLNFGQTGDSESVPDPQPLGEPPATPAALGPTTMASGGGAPMADNNEGADGVGNASGNWHCDSTWLGDRVITTSTRTWALPTYNNHLYKQISSASTGASNDNHYFGYSTPWGYFDFNRFHCHFSPRDWQRLINNNWGFRPKRLNFKLFNIQVKEVTTNDGVTTIANNLTSTVQVFSDSEYQLPYVLGSAHQGCLPPFPADVFMIPQYGYLTLNNGSKAVGRSSFYCLEYFPSQMLRTGNNFTFSYTFEEVPFHSSYAHSQSLDRLMNPLIDQYLYYLNRTQNQSGSAQNKDLLFSRGSPAGMSVQPKNWLPGPCYRQQRVSKTKTDNNNSNFTWTGASKYNLNGRESIINPGTAMASHKDDEDKFFPMSGVMIFGKESAGASNTALDNVMITDEEEIKATNPVATERFGTVAVNFQSSSTDPATGDVHVMGALPGMVWQDRDVYLQGPIWAKIPHTDGHFHPSPLMGGFGLKHPPPQILIKNTPVPANPPAEFSATKFASFITQYSTGQVSVEIEWELQKENSKRWNPEVQYTSNYAKSANVDFTVDNNGLYTEPRPIGTRYLTRPL

SEQ ID NO: 700 - protein, 736 aa, Artificial Sequence
  source: /note="Description of Artificial Sequence: Synthetic polypeptide"
MAADGYLPDWLEDNLSEGIREWWDLKPGAPKPKANQQKQDDGRGLVLPGYKYLGPFNGLDKGEPVNAADAAALEHDKAYDQQLKAGDNPYLRYNHADAEFQERLQEDTSFGGNLGRAVFQAKKRVLEPLGLVEEGAKTAPGKKRPVEQSPQEPDSSSGIGKTGQQPAKKRLNFGQTGDSESVPDPQPLGEPPATPAAVGPTTMASGGGAPMADNNEGADGVGNASGNWHCDSTWLGDRVITTSTRTWALPTYNNHLYKQISSTSTGASNDNHYFGYSTPWGYFDFNRFHCHFSPRDWQRLINNNWGFRPKRLNFKLFNIQVKEVTTNDGVTTIANNLTSTVQVFSDSEYQLPYVLGSAHQGCLPPFPADVFMIPQYGYLTLNNGSQAVGRSSFYCLEYFPSQMLRTGNNFTFSYTFEEVPFHSSYAHSQSLDRLMNPLIDQYLYYLNRTQNQSGSAQNKDLLFSRGSPAGMSVQPKNWLPGPCYRQQRVSKTKTDNNNSNFTWTGASKYNLNGRESIINPGTAVASHKDDEDKFFPMSGVMIFGKESAGASNTALDNVMITDEEEIKATNPVATERFGTVAVNFQSSSTDPATGDVHAMGALPGMVWQDRDVYLQGPIWAKIPHTDGHFHPSPLMGGFGLKNPPPQILIKNTPVPANPPAEFSATKFASFITQYSTGQVSVEIEWELQKENSKRWNPEVQYTSNYAKSANVDFTVDNNGLYTEPRPIGTRYLTRPL

SEQ ID NO: 701 - protein, 736 aa, Artificial Sequence
  source: /note="Description of Artificial Sequence: Synthetic polypeptide"
MAADGYLPDWLEDNLSEGIREWWALKPGAPQPKANQQHQDNARGLVLPGYKYLGPGNGLDKGEPVNAADAAALEHDKAYDQQLKAGDNPYLKYNHADAEFQERLKEDTSFGGNLGRAVFQAKKRLLEPLGLVEEAAKTAPGKKRPVEQSPQEPDSSAGIGKSGAQPAKKRLNFGQTGDTESVPDPQPIGEPPAAPSGVGSLTMASGGGAPVADNNEGADGVGSSSGNWHCDSQWLGDRVITTSTRTWALPTYNNHLYKQISNSTSGGSSNDNAYFGYSTPWGYFDFNRFHCHFSPRDWQRLINNNWGFRPKRLNFKLFNIQVKEVTDNNGVKTIANNLTSTVQVFTDSDYQLPYVLGSAHEGCLPPFPADVFMIPQYGYLTLNDGSQAVGRSSFYCLEYFPSQMLRTGNNFQFGYEFENVPFHSSYAHSQSLDRLMNPLIDQYLYYLSKTINGSGQNQQTLKFSVAGPSNMAVQGRNYIPGPSYRQQRVSTTVTQNNNSEFAWPGASSWALNGRNSLMNPGPAMASHKEGEDRFFPLSGSLIFGKQGTGRDNVDADKVMITNEEEIKTTNPVATESYGQVATNHQSAQAQAQTGWVQNQGILPGMVWQDRDVYLQGPIWAKIPHTDGNFHPSPLMGGFGMKHPPPQILIKNTPVPADPPTAFNKDKLNSFITQYSTGQVSVEIEWELQKENSKRWDPEIQYTSNYYKSNNVEFAVNTEGVYSEPRPIGTRYLTRNL

SEQ ID NO: 702 - protein, 736 aa, Artificial Sequence
  source: /note="Description of Artificial Sequence: Synthetic polypeptide"
MAADGYLPDWLEDNLSEGIREWWALKPGAPQPKANQQHQDNARGLVLPGYKYLGPGNGLDKGEPVNAADAAALEHDKAYDQQLKAGDNPYLKYNHADAEFQERLKEDTSFGGNLGRAVFQAKKRLLEPLGLVEEAAKTAPGKKRPVEQSPQEPDSSAGIGKSGAQPAKKRLNFGQTGDTESVPDPQPIGEPPAAPSGVGSLTMASGGGAPVADNNEGADGVGSSSGNWHCDSQWLGDRVITTSTRTWALPTYNNHLYKQISNSTSGGSSNDNAYFGYSTPWGYFDFNRFHCRFSPRDWQRLINNNWGFRPKRLNFKLFNIQVKEVTDNNGVKTIANNLTSTVQVFTDSDYQLPYVLGSAHEGCLPPFPADVFMIPQYGYLTLNDGSQAVGRSSFYCLEYFPSQMLRTGNNFQFSYEFENVPFHSSYAHSQSLDRLMNPLIDQYLYYLSKTINGSGQNQQTLKFSVAGPSNMAVQGRNYIPGPSYRQQRVSTTVTQNNNSEFAWPGASSWALNGRNSLMNPGPAMASHKEGEDRFFPLSGSLIFGKQGTGRDNVDADKVMITNEEEIKTTNPVATESYGQVATNHQSAQAQAQTGWVQNQGILPGMVWQDRDVYLQGPIWAKIPHTDGNFHPSPLMGGFGMKHPPPQILIKNAPVPADPPTAFNKDKLNSFITQYSTGQVSVEIEWELQKENSKRWNPEIQYTSNYYKSNNVEFAVNTEGVYSEPRPIGTRYLTRNL

SEQ ID NO: 703 - protein, 736 aa, Artificial Sequence
  source: /note="Description of Artificial Sequence: Synthetic polypeptide"
MAADGYLPDWLEDNLSEGIREWWALKPGAPQPKANQQHQDNARGLVLPGYKYLGPGNGLDKGEPVSAADAAALEHDKAYDQQLKAGDNPYLKYNHADAEFQERLKEDTSFGGNLGRAVFQAKKRLLEPLGLVEEAAKTAPGKKRPVEQSPQEPDSSAGIGKSGAQPAKKRLNFGQTGDTESVPDPQPIGEPPAAPSGVGSLTMASGGGAPVADNNEGADGVGSSSGNWHCDSQWLGDRVITTSTRTWALPTYNNHLYKQISNSTSGGSSNDNAYFGYSTPWGYFDFNRFHCHFSPRDWQRLINNNWGFRPKRLNFKLFNIQVKEVTDNNGVKTIANNLTSTVQVFTDSDYQLPYVLGSAHEGCLPPFPADVFMIPQYGYLTLNDGSQAVGRSSFYCLEYFPSQMLRTGNNFQFSYEFENVPFHSSYAHSQSLDRLMNPLIDQYLYYLSKTINGSGQNQQTLKFSVAGPSNMAVQGRNYIPGPSYRQQRVSTTVTQNNNSEFAWPGASSWALNGRNSLMNPGPAMASHKEGEDRFFPLSGSLIFGKQGTGRDNVDADKVMITNEEEIKTTNPVATESYGQVATNHQSAQAQAQTGWVQNQGILPGMVWQDRDVYLQGPIWAKIPHTDGNFHPSPLMGGFGMKHPPPQILIKNTPVPADPPTAFNKDKLNSFITQYSTGQVSVEIEWELQKENSKRWNPEIQYTSNYYKSNNVEFAVNTEGVYSEPRPIGTRYLTRNL

SEQ ID NO: 704 - protein, 736 aa, Artificial Sequence
  source: /note="Description of Artificial Sequence: Synthetic polypeptide"
MAADGYLPDWLEDNLSEGIREWWALKPGAPQPKANQQHQDNARGLVLPGYKYLGPGNGLDKGEPVNAADAAALEHDKAYDQQLKAGDNPYLKYNHADAEFQERLKEDTSFGGNLGRAVFQAKKRLLEPLGLVEEAAKTAPGKKRPVEQSPQEPDSSAGIGKSGAQPAKKRLNFGQTGDTESVPDPQPIGEPPAAPSGVGSLTMASGGGAPVADNNEGADGVGSSSGNWHCDSQWLGDRVITTSTRTWALPTYNNHLYKQISNSTSGGSSNDNAYFGYSTPWGYFDFNRFHCHFSPRDWQRLINNNWGFRPKRLNFKLFNIQVKEVTDNNGVKTIANNLTSTVQVFTDSDYQLPYVLGSAHEGCLPPFPADVFMIPQYGYLTLNDGSQAVGRSSFYCLEYFPSQMLRTGNNFQFSYEFENVPFHSSYAHSQSLDRLMNPLIDQYLYYLSKTINGSGQNQQTLKFSVAGPSNTAVQGRNYIPGPSYRQQRVSTTVTQNNNSEFAWPGASSWALNGRNSLMNPGPAMASHKEGEDRFFPLSGSLIFGKQGTGRDNVDADKVMITNEEEIKTTNPVATESYGQVATNHQSAQAQAQTGWVQNQGILPGMVWQDRDVYLQGPIWAKIPHTDGNFHPSPLMGGFGMKHPPPQILIKNTPVPADPPTAFNKDKLNSFITQYSTGQVSVEIEWELQKENSKRWNPEIQYTSNYYKSNNVEFAVNTEGVYSEPRPIGTRYLTRNL

SEQ ID NO: 705 - protein, 736 aa, Artificial Sequence
  source: /note="Description of Artificial Sequence: Synthetic polypeptide"
MAADGYLPDWLEDNLSEGIREWWALKPGAPQPKANQQHQDNARGLVLPGYKYLGPGNGLDKGEPVNAADAAALEHDKAYDQQLKAGDNPYLKYNHADAEFQERLKEDTSFGGNLGRAVFQAKKRLLEPLGLVEEAAKTAPGKKRPVEQSPQEPDSSAGIGKSGAQPAKKRLNFGQTGDTESVPDPQPIGEPPAAPSGVGSLTMASGGGAPVADNNEGADGVGSSSGNWHCDSQWLGDRVITTSTRTWALPTYNNHLYKQISNSTSGGSSNDNAYFGYSTPWGYFDFNRFHCHFSPRDWQRLINNNWGFRPKRLNFKLFNIQVKEVTDNNGVKTIANNLTSTVQVFTDSDYQLPYVLGSAHEGCLPPFPADVFMIPQYGYLTLNDGSQAVGRSSFYCLEYFPSQMLRTGSNFQFSYEFENVPFHSSYAHSQSLDRLMNPLIDQYLYYLSKTINGSGQNQQTLKFSVAGPSNMAVQGRNYIPGPSYRQQRVSTTVTQNNNSEFAWPGASSWALNGRNSLMNPGPAMASHKEGEDRFFPLSGSLIFGKQGTGRDNVDADKVMITNEEEIKTTNPAATESYGQVATNHQSAQAQAQTGWVQNQGILPGMVWQDRDVYLQGPIWAKIPHTDGNFHPSPLMGGFGMKHPPPQILIKNTPVPADPPTAFNKDKLNSFITQYSTGQVSVEIEWELQKENSKRWNPEIQHTSNYYKSNNVEFAVNTEGVYSEPRPIGTRYLTRNL

SEQ ID NO: 706 - protein, 736 aa, Artificial Sequence
  source: /note="Description of Artificial Sequence: Synthetic polypeptide"
MAADGYLPDWLEDNLSEGIREWWALKPGAPQPKANQQHQDNARGLVLPGYKYLGPGNGLDKGEPVNAADAAALEHDKAYDQQLKAGDNPYLKYNHADAEFQERLKEDTSFGGNLGRAVFQAKKRLLEPLGLVEEAAKTAPGKKRPVEQSPQEPDSSAGIGKSGAQPAKKRLNFGQTGDTESVPDPQPIGEPPAAPSGVGSLTMASGGGAPVADNNEGADGVGSSSGNWHCDSQWLGDRVITTSTRTWALPTYNNHLYKQISNSTSGGSSNDNAYFGYSTPWGYFDFNRFHCHFSPRDWQRLINNNWGFRPKRLNFRLFNIQVKEVTDNNGVKTIANNLTSTVQVFTDSDYQLPYVLGSAHEGCLPPFPADVFMIPQYGYLTLNDGSQAVGRSSFYCLEYFPSQMLRTGNNFQFSYEFENVPFHSSYAHSQSLDRLMNPLIDQYLYYLSKTINGSGQNQQTLKFSVAGPSNMAVQGRNYIPGPSYRQQRVSTTVTQNNNSEFAWPGASSWALNGRNSLMNPGPAMASHKEGEDRFFPLSGSLIFGKQGTGRDNVDADKVMITNEEEIKTTNPVATESYGQVATNHQSAQAQAQTGWVQSQGILPGMVWQDRDVYLQGPIWAKIPHTDGNFHPSPLMGGFGMKHPPPQILIKNTPVPADPPTAFNKDKLNSFITQYSTGQVSVEIEWELQKENSKRWNPEIQYTSNYYKSNNVEFAVNTEGVYSEPRPIGTRYLTRNL

SEQ ID NO: 707 - protein, 735 aa, Artificial Sequence
  source: /note="Description of Artificial Sequence: Synthetic polypeptide"
MAADGYLPDWLEDNLSEGIREWWALKPGAPQPKANQQHQDNARGLVLPGYKYLGPGNGLDKGEPVNAADAAALEHDKAYDQQLKAGDNPYLKYNHADAEFQERLKEDTSFGGNLGRAVFQAKKRLLEPLGLVEEAAKTAPGKKRPVEQSPQEPDSSAGIGKSGAQPAKKRLNFGQTGDTESVPDPQPIGEPPAAPSGVGSLTMASGGGAPVADNNEGADGVGSSSGNWHCDSQWLGDRVITTSTRTWALPTYNNHLYKQISNSTSGGSSNDNAYFGYSTPWRYFDFNRFHCHFSPRDWQRLINNWGFRPKRLNFKLFNIQVKEVTDNNGVKTIANNLTSTVQAFTDSDYQLPYVLGSAHEGCLPPFPADVFMIPQYGYLTLNDGSQAVGRSSFYCLEYFPSQMLRTGNNFQFSYEFENVPFHSSYAHSQSLDRLMNPLIDQYLYYLSKTINGSGQNQQTLKFSVAGPSNMAVQGRNYIPGPSYRQQRVSTTVTQNNNSEFAWPGASSWALNGRNSLMNPGPAMASHKEGEDRFFPLSGSLIFGKQGTGRDNVDADKVMITNEEEIKTTNPVATESYGQVATNHQSAQAQAQTGWVQNQGILPGMVWQDRDVYLQGPIWAKIPHTDGNFHPSPLMGGFGMKHPPPQILIKNTPVPADPPTAFNKDELNSFITQYSTGQVSVEIEWELQKENSKRWNPEIQYTSNYYKSNNVEFAVNTEGVYSEPRPIGTRYLTRNL

SEQ ID NO: 708 - protein, 735 aa, Artificial Sequence
  source: /note="Description of Artificial Sequence: Synthetic polypeptide"
MAADGYLPDWLEDNLSEGIREWWALKPGAPQPKANQQHQDNARGLVLPGYKYLGPGNGLDKGEPVNAADAAALEHDKAYDQQLKAGDNPYLKYNHADAEFQERLKEDTSFGGNLGRAVFQDKKRLLEPLGLVEEAAKTAPGKKRPVEQSPQEPDSSAGIGKSGAQPAKKRLNFGQTGDTESVPDPQPIGEPPAAPSGVGSLTMASGGGAPVADNNEGADGVGSSSGNWHCDSQWLGDRVITTSTRTWALPTYNNHLYKQISNSTSGGSSNDNAYFGYSTPWGYFDFNRFHCHFSPRDWQRLINNWGFRPKRLNFKLFNIQVKEVTDNNGVKTIANNLTSTVQVFTDSDYQLPYVLGSAHEGCLPPFPADVFMIPQYGYLTLNDGSQAVGRSSFYCLEYFPSQMLRTGNNFQFSYEFENVPFHSSYAHSQSLDRLMNPLIDQYLYYLSKTINGSGQNQQTLKFSVAGPSNMAVQGRNYIPGPSYRQQRVSTTVTQNNNSEFAWPGASSWALNGRNSLMNPGPAMASHKEGEDRFFPLSGSLIFGKQGTGRDNVDADKVMITNEEEIKTTNPVATESYGQVATNHQSAQAQAQTGWVQNQGILPGMVWQDRDVYLQGPIWAKIPHTDGNFHPSPLMGGFGMKHPPPQILIKNTPVPADPPTAFNKDKLNSFITQYSTGQVSVEIEWELQKENSKRWNPEIQYTSNYYKSNNVEFAVNTEGVYSEPRPIGTRYLTRNL

SEQ ID NO: 709 - protein, 736 aa, Artificial Sequence
  source: /note="Description of Artificial Sequence: Synthetic polypeptide"
MAADGYLPDWLEDNLSEGIREWWALKPGAPQPKANQQHQDNARGLVLPGYKYLGPGNGLDKGEPVNAADAAALEHDKAYDQQLKAGDNPYLKYNHADAEFQERLKEDTSFGGNLGRAVFQAKKRLLEPLGLVEEAAKTAPGKKRPVEQSPQEPDSSAGIGKSGAQPAKKRLNFGQTGDTESVPDPQPIGEPPAAPSGVGSLTMASGGGAPVADNNEGADGVGSSSGNWHCDSQWLGDRAITTSTRTWALPTYNNHLYKQISNSTSGGSSNDNAYFGYSTPWGYFDFNRFHCHFSPRDWQRLINNNWGFRPKRLNFKLFNIQVKEVTDNNGVKTIANNLTSTVQVFTDSDYQLPYVLGSAHEGCLPPFPADVFMIPQYGYLTLNDGSQAVGRSSFYCLEYFPSQMLRTGNNFQFSYEFENVPFHSSYAHSQSLDRLMNPLIDQYLYYLSKTINGSGQNQQTLKFSVAGPSNMAVQGRNYIPGPSYRQQRVSTTVTQNNNSEFAWPGASSWALNGRNSLMNPGPAMASHKEGEDRFFPLSGSLIFGKQGTGRDNVDADKVMTTNEEEIKTTNPVATESYGQVATNHQSAQAQAQTGWVQNQGILPGMVWQDRDVYLQGPIWAKIPHTDGNFHPSPLMGGFGMKHPPPQILIKNTPVPADPPTAFNKDKLNSFITQYSTGQVSVEIEWELQKENSKRWNPEIQYTSNYYKSNNVEFAVNTEGVYSEPRPIGTRYLTRNL

SEQ ID NO: 710 - protein, 736 aa, Artificial Sequence
  source: /note="Description of Artificial Sequence: Synthetic polypeptide"
MAADGYLPDWLEDNLSEGIREWWALKPGAPQPKANQQHQDNARGLVLPGYKYLGPGNGLDKGEPVNAADAAALEHDKAYDQQLKAGDNPYLKYNHADAEFQERLKEDTSFGGNLGRAVFQTKKRLLEPLGLVEEAAKTAPGKKRPVEQSPQEPGSSAGIGKSGAQPAKKRLNFGQTGDTESVPDPQPIGEPPAAPSGVGSLTMASGGGAPVADNNEGADGVGSSSGNWHCDSQWLGDRVITTSTRTWALPTYNNHLYKQISNSTSGGSSNDNAYFGYSTPWGYFDFNRFHCHFSPRDWQRLINNNWGFRPKRLNFKLFNIQVKEVTDNNGVKTIANNLTSTVQVFTDSDYQLPYVLGSAHEGCLPPFPADVFMIPQYGYLTLNDGSQAVGRSSFYCLEYFPSQMLRTGNNFQFSYEFENVPFHSSYAHSQSLDRLMNPLIDQYLHYLSKTINGSGQNQQTLKFSVAGPSNMAVQGRNYIPGPSYRQQRVSTTVTQNNNSEFAWPGASSWALNGRNSLMNPGPAMASHKEGEDRFFPLSGSLIFGKQGTGRDNVDADKVMITNEEEIKTTNPVATESYGQVATNHQSAQAQAQTGWVQNQGILPGMVWQDRDVYLQGPIWAKIPHTDGNFHPSPLMGGFGMKHPPPQILIKNTPVPADPPTAFNKDKLNSFITQYSTGQVSVEIEWELQKENSKRWNPEIQYTSNYYKSNNVEFAVNTEGVYSEPRPIGTRYLTRNL

SEQ ID NO: 711 - protein, 736 aa, Artificial Sequence
  source: /note="Description of Artificial Sequence: Synthetic polypeptide"
MAADGYFPDWLEDNLSEGIREWWALKPGAPQPKANQQHQDNARGLVLPGYKYLGPGNGLDKGEPVNAADAAALEHDKAYDQQLKAGDNPYLKYNHADAEFQERLKEDTSFGGNLGRAVFQAKKRLLEPLGLVEEAAKTAPGKKRPVEQSPQEPDSSAGIGKSGAQPAKKRLNFGQTGDTESVPDPQPIGESPAAPSGVGSLTMASGGGAPVADNNEGADGVGSSSGNWHCDSQWLGDRVITTSTRTWALPTYNNHLYKQISNSTSGGSSNDNAYFGYSTPWGYFDFNRFHCHFSPRDWQRLINNNWGFRPKRLNFKLFNIQVKEVTDNNGVKTIANNLTSTVQVFTDSDYQLPYVLGSAHEGCLPPFPADVFMIPQYGYLTLNDGSQAVGRSSFYCLEYLPSQMLRTGNNFQFSYEFENVPFHSSYAHSQSLDRLMNPLIDQYLHYLSKTINGSGQNQQTLKFSVAGPSNMAVQGRNYIPGPSYRQQRVSTTVTQNNNSEFAWPGASSWALNGRNSLMNPGPAVASHKEGEDRFFPLSGSLIFGKQGTGRDNVDADKVMITNEEEIKTTNPVATESYGQVATNHQSAQAQAQTGWVQNQGILPGMVWQDRDVYLQGPIWAKIPHTDGNFHPSPLMGGFGMKHPPPQILIKNTPVPADPPTAFNKDKLNSFITQYSTGQVSVEIEWELQKENSKRWNPEIQYTSNYYKSNNVEFAVNTEGVYSEPRPIGTRYLTRNL

SEQ ID NO: 712 - protein, 736 aa, Artificial Sequence
  source: /note="Description of Artificial Sequence: Synthetic polypeptide"
MAADGYLPDWLEDNLSEGIREWWALKPGAPQPKANQQHQDNARGLVLPGYKYLGPGNGLDKGEPVNAADAAALEHDKAYDQQLKAGDNPYLKYNHADAEFQERLKEDTSFGGNLGRAVFQAKKRLLEPLGPVEEAAKTAPGKKRPVEQSPQEPDSSAGIGKSGAQPAKKRLNFGQTGDTESVPDPQPIGEPPAAPSGVGSLTMASGGGAPVADNNEGADGVGSSSGNWHCDSQWLGDRVITTSTRTWALPTYNNHLYKQISNSTSGGSSNDNAYFGYSTPWGYFDFNRFHCHFSPRDWQRLINNNWGFRPKRLNFKLFNIQVKEVTDNNGVKTIANNLTSTVQVFTDSDYQLPYVLGSAHEGCLPPFPADVFMIPQYGYLTLNDGSQAVGRSSFYCLEYFPSQMLRTGNNFQFSYEFENVPFHSSYAHSQSLDRLMNPLIDQYLYYLSKTINGSGQNQQTLKFSVAGPSNMAVQGRNYIPGPSYRQQRVSTTVTQNNNSEFAWPGASSWALNGRNSLMNPGPAMASHKEGEDRFFPLSGSLIFGKQGTGRDNVDADKVMITNEEEIKTTNPVATESYGQAATNHQSAQAQAQTGWVQNQGILPGMVWQDRDVYLQGPIWAKIPHTDGNFHPSPLMGGFGMKHPPPQILIKNTPVPADPPTAFNKDKLNSFITQYSTGQVSVEIEWELQKENSKRWNPEIQYTSNYYKSNNVEFAVNTEGVYSEPRPIGTRYLTRNL

SEQ ID NO: 713 - protein, 736 aa, Artificial Sequence
  source: /note="Description of Artificial Sequence: Synthetic polypeptide"
MAADGYLPDWLEDNLSEGIREWWALKPGAPQPKANQQHQDNARGLVLPGYKYLGPGNGLDKGEPVNAADAAALEHDKAYDQQLKAGDNPYLKYNHADAEFQERLKEDTSFGGNLGRAVFQAKKRLLEPLGPVEEAAKTAPGKKRPVEQSPQEPDSSAGIGKSGAQPAKKRLNFGQTGDTESVPDPQPIGEPPAAPSGVGSLTMASGGGAPVADNNEGADGVGSSSGNWHCDSQWLGDRVITTSTRTWALPTYNNHLYKQISNSTSGGSSNDNAYFGYSTPWGYFDFNRFHCHFSPRDWRRLINNNWGFRPKRLNFKLFNIQVKEVTDNNGVKTIANNLTSTVQVFTDSDYQLPYVLGSAHEGCLPPFPADVFMIPQYGYLTLNDGSQAVGRSSFYCLEYFPSQMLRTGNNFQFSYEFENVPFHSSYAHSQSLDRLMNPLIDQYLYYLSKTINGSGQNQQTLKFSVAGPSNMAVQGRNYIPGPSYRQQRVSTTVTQNNNSEFAWPGASSWALNGRNSLMNPGPAMASHKEGEDRFFPLSGSLIFGKQGTGRDNVDADKVMITNEEEIKTTNPVATESYGQVATNHQSAQAQAQTGWVQNQGILPGMVWQDRDVYLQGPIWAKIPHTDGNFHPSPLMGGFGMKHPPPQILIKNTPVPADPPTAFNKDKLNSFITQYSTGQVSVEIEWELQKENSKRWNPEIQYTSNYYKSNNVEFAVNTEGVYSEPRPIGTRYLTRNL

SEQ ID NO: 714 - protein, 736 aa, Artificial Sequence
  source: /note="Description of Artificial Sequence: Synthetic polypeptide"
MAADGYLPDWLEDNLSEGIREWWALKPGAPQPKANQQHQDNARGLVLPGYKYLGPGNGLDKGEPVNAADAAALEHDKAYDQQLKAGDNLYLKYNHADAEFQERLKEDTSFGGNLGRAVFQAKKRLLEPLGLVEEAAKTAPGKKRPVEQSPQEPDSSAGIGKSGAQPAKKRLNFGQTGDTESVPDPQPIGEPPAAPSGVGSLTMASGGGAPVADNNEGADGVGSSSGNWHCDSQWLGDRVITTSTRTWALPTYNNHLYKQISNSTSGGSSNDNAYFGYSTPWGYFDFNRFHCHFSPRDWQRLINNNWGFRPKRLNFKLFNIQVKEVTDNNGVKTIANNLTSTVQVFTDSDYQLPYVLGSAHEGCLPPFPADVFMIPQYGYLTLNDGSQAVGRSSFYCLEYFPSQMLRTGNNFQFSYEFENVPFHSSYAHSQSLDRLMNPLIDQYLHYLSKTINGSGQNQQTLKFSVAGPSNMAVQGRNYIPGPSYRQQRVSTTVTQNNNSEFAWPGASSWALNGRNSLMNPGPAMASHKEGEDRFFPLSGSLIFGKQGTGRDNVDADKVMITNEEEIKTTNPVATESYGQVATNHQSAQAQAQTGWVQNQGILPGMVWQDRDVYLQGPIWAKIPHTDGNFHPSPLMGGFGMKHPPPQILIKNTPVPADPPTAFNKDKLNSFITQYSTGQVSVEIEWELQKENSKRWNPEIQYTSNYYKSNNVEFAVNTEGVYSEPRPIGTRYLTRNL

SEQ ID NO: 715 - protein, 736 aa, Artificial Sequence
  source: /note="Description of Artificial Sequence: Synthetic polypeptide"
MAADGYLPDWLEDNLSEGIREWWALKPGAPQPKANQQHQDNARGLVLPGYKYLGPGNGLDKGEPVNAADAAALEHDKAYDQQLKAGDNPYLKYNHADAEFQERLKEDTSFGGNLGRAVFQAKKRLLEPLGLVEEAAKTAPGKKRPVEQSPQEPDSSAGIGKSGAQPAKKRLNFGQTGDTESVPDPQPIGEPPAAPSGVGSLTMASGGGAPVADNNEGADGVGSSSGNWHCDSQWLGDRVITTSTRTWALPTYNNHLYKQISNSTSGGSSNDNAYFGYSTPWGYFDFNRFHCHFSPRDWQRLINNNWGFRPKRLNFKLFNIQVKEVTDNNGVKTIANNLTSTVQVFTDSDYQLPYVLGSAHEGCLPPFPADVFMIPQYGYLTLNDGSQAVGRSSFYCLEYFPSQMLRTGNNFQFSYEFENVPFHSSYAHSQSLDRLMNPLIDQYLHYLSKTINGSGQNQQTLKFSVAGPSNMAVQGRNYIPGPSYRQQRVSTTVTQNNNSEFAWPGASSWALNGRNSLMNPGPAMASHKEGEDRFFPLSGSLIFGKQGTGRDNVDADKVMITNEEEIKTTNPVATESYGQVATNHQSAQAQAQTGWVQNQGILPGMVWQDRDVYLQGPIWAKIPHTDGNFHPSPLMGGFGMKHPPPQILIKNTPVPADPPTAFNKDKLNSFITQYSTGQVSVEIEWELQKENSKRWNPEIQYTSNYYKSNNVEFAVNTEGVYSEPRPIGTRYLTRNL

SEQ ID NO: 716 - protein, 736 aa, Artificial Sequence
  source: /note="Description of Artificial Sequence: Synthetic polypeptide"
  MOD_RES (442)..(442): Any naturally occurring amino acid
MAADGYLPDWLEDNLSEGIREWWALKPGAPQPKANQQHQDNARGLVLPGYKYLGPGNGLDKGEPVNAADAAALEHDKAYDQQLKAGDNPYLKYNHADAEFQERLKEDTSFGGNLGRAVFQAKKRLLEPLGLVEEAAKTAPGKKRPVEQSPQEPDSSAGIGKSGAQPAKKRLNFGQTGDTESVPDPQPIGEPPAAPSGVGSLTMASGGGAPVADNNEGADGVGSSSGNWHCDSQWLGDRVITTSTRTWALPTYNNHLYKQISTSTSGGSSNDNAYFGYSTPWGYFDFNRFHCHFSPRDWQRLINNNWGFRPKRLNFKLFNIQVKEVTDNNGVKTIANNLTSTVQVFTDSDYQLPYVLGSAHEGCLPPFPADVFMIPQYGYLTLNDGSQAVGRSSFYCLEYFPSQMLRTGNNFQFSYEFENVPFHSSYAHSQSLDRLMNPLIDXYLHYLSKTINGSGQNQQTLKFSVAGPSNMAVQGRNYIPGPSYRQQRVSTTVTQNNNSEFAWPGASSWALNGRNSLMNPGPAMASHKEGEDRFFPLSGSLIFGKQGTGRDNVDADKVMITNEEEIKTTNPVATESYGQVATNHQSAQAQAQTGWVQNQGILPDMVWQDRDVYLQGPIWAKIPHTDGNFHPSPLMGGFGMKHPPPQILIKNTPVPADPPTAFNKDKLNSFITQYSTGQVSVEIEWELQKENSKRWNPEIQYTSNYYKSNNVEFAVNTEGVYSEPRPIGTRYLTRNL

SEQ ID NO: 717 - protein, 736 aa, Artificial Sequence; identical to SEQ ID NO: 697
  source: /note="Description of Artificial Sequence: Synthetic polypeptide"

SEQ ID NO: 718 - protein, 736 aa, Artificial Sequence; identical to SEQ ID NO: 701
  source: /note="Description of Artificial Sequence: Synthetic polypeptide"

SEQ ID NO: 719 - protein, 736 aa, Artificial Sequence
  source: /note="Description of Artificial Sequence: Synthetic polypeptide"
MAADGYLPDWLEDNLSEGIREWWALKPGAPQPRANQQHQDNARGLVLPGYKYLGPGNGLDKGEPVNAADAAALEHDKAYDQQLKAGDNPYLKYNHADAEFQERLKEDTSFGGNLGRAVFQAKKRLLEPLGLVEEAAKTAPGKKRPVEQSPQEPDSSAGIGKSGAQPAKKRLNFGQTGDTESVPDPQPIGEPPAAPSGVGSLTMASGGGAPVADNNEGADGVGSSSGNWHCDSQWLGDRVITTSTRTWALPTYNNHLYKQISNSTSGGSSNDNAYFGYSTPWGYFDFNRFHCHFSPRDWQRLINNNWGFRPKRLNFKLFNIQVKEVTDNNGVKTIANNLTSTVQVFTDSDCQLPYVLGSAHEGCLPPFPADVFMIPQYGYLTLNDGSQAVGRSSFYCLEYFPSQMLRTGNNFQFSYEFENVPFHSSYAHSQSLDRLTNPLIDQYLYYLSKTINGSGQNQQTLKFSVAGPSNMAVQGRNYIPGPSYRQQRVSTTVTQNNNSEFAWPGASSWALNGRNSLMNPGPAMASHKEGEDRFFPLSGSLIFGKQGTGRDNVDADKVMITNEEEIKTTNPVATESHGQVATNHQSAQAQAQTGWVQNQGILPGMVWQDRDVYLQGPIWAKIPHTDGNFHPSPLMGGFGMKHPPPQILIKNTPVPADPPTAFNKDKLNSFITQYSTGQVSVEIEWELQKENSKRWNPEIQYTSNYYKSNNVEFAVNTEGVYSEPRPIGTRYLTRNL

SEQ ID NO: 720 - protein, 736 aa, Artificial Sequence
  source: /note="Description of Artificial Sequence: Synthetic polypeptide"
MAADGYLPDWLEDNLSEGIREWWALKPGAPQPKANQQHQDNARGLVLPGYKYLGPGNGLDKGEPVNAADAAALEHDKAYDQQLKAGDNPYLKYNHADAEFQERLKEDTSFGGNLGRAVFQAKKRLLEPLGLVEEAAKTAPGKKRPVEQSPQEPDSSAGIGKSGAQPAKKRLNFGQTGDTESVPDPQPIGEPPAAPSGVGSLTMASGGGAPVADNNEGADGVGSSSGNWHCDSQWLGDRVITTSTRTWALPTYNNHLYKQISNSTSGGSSNDNAYFGYSTPWGYFDFNRFHCHFSPRDWQRLINNNWGFRPKRLNFKLFNIQVKEVTDNNGVKTIANNLTSTVQVFTDSDYQLPYVLGSAHEGCLPPFPADVFMIPQYGYLTLNDGSQAVGRSSFYCLEYFPSQMLRTGNNFQFSYEFENVPFHSSYAHSQSLDRLMNPPIDQYLYYLSKTINGSGQNQQTLKFSVAGPSNMAVQGRNYIPGPSYRQQRVSTTVTQNNNSEFAWPGASSWALNGRNSLMNPGPAMASHKEGEDRFFPLSGSLIFGKQGTGRDNVDADKVMITNEEEIKTTNPVATESYGQVATNHQSAQAQAQTGWVQNQGILPGMVWQDRDVYLQGPIWAKIPHTDGNFHPSPLMGGFGMKHPPPQILIKNTPVPADPPTAFNKDKLNSFITQYSTGQVSVEIEWELQKENSKRWNPEIQYTSNYYKSNNVEFAVNTEGVYGEPRPIGTRYLTRNL

SEQ ID NO: 721 - protein, 736 aa, Artificial Sequence
  source: /note="Description of Artificial Sequence: Synthetic polypeptide"
MAADGYLPDWLEDNLSEGIREWWALKPGAPQPKANQQHQDNARGLVLPGYKYLGPGNGLDKGEPVNAADAAALEHDKAYDQQLKAGDNPYLKYNHADAEFQERLKEDTSFGGNLGRAVFQAKKRLLEPLGLVEEAAKTAPGKKRPVEQSPQEPDSSAGIGKSGAQPAKKRLNFGQTGDTESVPDPQPIGEPPAAPSGVGSLTMASGGGAPVADNNEGADGVGSSSGNWHCDSQWLGDRVITTSTRTWALPTYNNHLYKQISNSTSGGSSNDNAYFGYSTPWGYFDFNRFHCHFSPRDRQRLINNNWGFRPKRLNFKLFNIQVKEVTDNNGVKTIANNLTSTVQVFTDSDYQLPYVLGSAHEGCLPPFPADVFMIPQYGYLTLNDGSQAVGRSSFYCLEYFPSQMLRTGNNFQFSYEFENVPFHSSYAHSQSLDRLMNPLIDQYLYYLSKTINGSGQNQQTLKFSVAGPSNMAVQGRNYIPGPSYRQQRVSTTVTQNNNSEFAWPGASSWALNGRNSLMNPGPAMASHKEGEDRFFPLSGSLIFGKQGTGRDNVDADKVMITNEEEIKTTNPVATESYGQVATNHQSAQAQAQTGWVQNQGILPGMVWQDRDVYLQGPIWAKIPHTDGNFHPSPLMGGFGMKHPPPQILIKNTPVPADPPTAFNKDKLNSFITQYSTGQVSVEIEWELQKENSKRWNPEIQYTSNYYKSNNVEFAVNTEGVYSEPRPIGTRYLTRNL

SEQ ID NO: 722 - protein, 736 aa, Artificial Sequence
  source: /note="Description of Artificial Sequence: Synthetic polypeptide"
MAADGYLPDWLEDNLSEGIREWWALKPGAPQPKANQQHQDNARGLVLPGYKYLGPGNGLDKGEPVNAADAAALEHDKAYDQQLKAGDNPYLKYNHADAEFQERLKEDTSFGGNLGRAVFQAKKRLLEPLGLVEEAAKTAPGKKRPVEQSPQEPDSSAGIGKSGAQPAKKRLNFGQTGDTESVPDPQPIGEPPAAPSGVGSLTMASGGGAPVADNNEGADGVGSSSGNWHCNSQWLGDRVITTSTRTWALPTYNNHLYKQISNSTSGGSSNDNAYFGYSTPWGYFDFNRFHCHFSPRDWQRLINNNWGFRPKRLNFKLFNIQVKEVTDNNGVKTIANNLTSTVQVFTDSDYQLPYVLGSAHEGCLPPFPADVFMIPQYGYLTLNDGSQAVGRSSFYCLEYFPSQMLRTGNNFQFSYEFENVPFHSSYAHSQSLDRLMNPLIDQYLYYLSKTINGSGQNQQTLKFSVAGPGNMAVQGRNYIPGPSYRQQRVSTTVTQNNNSEFAWPGASSWALNGRNSLMNPGPAMASHKEGEDRFFPLSGSLIFGKQGTGRDNVDADKVMITNEEEIKTTNPVATESYGQVATNHQSAQAQAQTGWVQNQGILPGMVWQDRDVYLQGPIWAKIPHTDGNFHPSPLMGGFGMKHPPPQILIKNTPVPADPPTAFNKDKLNSFITQYSTGQVSVEIEWELQKENSKRWNPEIQYTSNYYKSNNVEFAVNTEGVYSEPRPIGTRYLTRNL

SEQ ID NO: 723 - protein, 736 aa, Artificial Sequence
  source: /note="Description of Artificial Sequence: Synthetic polypeptide"
MAADGYLPDWLEDNLSEGIREWWALKPGAPQPKANQQHQDNARGLVLPGYRYLGPGNGLDKGEPVNAADAAALEHDKAYDQQLKAGDNPYLKYNHADAEFQERLKEDTSFGGNLGRAVFQAKKRLLEPLGLVEEAAKTAPGKKRPVEQSPQEPDSSAGIGKSGAQPAKKRLNFGQTGDTESVPDPQPIGEPPAAPSGVGSLTMASGGGAPVADNNEGADGVGSSSGNWHCDSQWLGDRVITTSTRTWALPTYNNHLYKQISNSTSGGSSNDNAYFGYSTPWGYFDFNRFHCHFSPRDWQRLINNNWGFRPKRLNFKLFNIQVKEVTDNNGVKTVANNLTSTVQVFTDSDYQLPYVLGSAHEGCLPPFPADVFMIPQYGYLTLNDGSQAVGRSSFYCLEYFPSQMLRTGNNFQFSYEFENVPFHSSYAHSQSLDRLMNPLIDQYLYYLSKTINGSGQNQQTLKFSVAGPSNMAVQGRNYIPGPSYRQQRVSTTVTQNNNSEFAWPGASSWALNGRNSLMNPGPAMASHKEGEDRFFPLSGSLIFGKQGTGRDNVDADKVMITNEEEIKTTNPVATESYGQVATNHQSAQAQAQTGWVQNQGILPGMVWQDRDVYLQGPIWAKIPHTDGNFHPSPLMGGFGMKHPPPQILIKNTPVPADPPTAFNKDKLNSFITQYSTGQVSVEIEWELQKENSKRWNPEIQYTSNYYKSNNVEFAVNTEGVYSGPRPIGTRYLTRNL

SEQ ID NO: 724 - protein, 736 aa, Artificial Sequence; identical to SEQ ID NO: 134
  source: /note="Description of Artificial Sequence: Synthetic polypeptide"

SEQ ID NO: 725 - protein, 736 aa, Artificial Sequence
  source: /note="Description of Artificial Sequence: Synthetic polypeptide"
MAADGYLPDWLEDNLSEGIREWWALKPGAPQPKANQQRQDNARGLVLPGYKYLGPGNGLDKGEPVNAADAAALEHDKAYDQQLKAGGNPCLKYNHADAEFQERLKEDTSFGGNLGRAVFQAKKRLLEPLGLVEEAAKTAPGKKRPVEQSPQEPDSSAGIGRSGAQPAKKRLNFGQTGDTESVPDPQPIGEPPAAPSGVGSLTMASGGGAPVADNNEGADGVGSSSGNWHCDSQWLGDRVITTSTRTWALPTYNNHLYKQISNSTSGGSSNDNAYFGYSTPWGYFDFNRFHCHFSPRDWQRLINNNWGFRPKRLNFKLFNIQVKEVTDNNGVKAIANNLTSTVQVFTDSDYQLPYVLGSAHEGCLPPFPADVFMIPQYGYLTLNDGSQAVGRSSFYCLEYFPSQMLRTGNNFQFSYEFENVPFHSSYAHSQSLDRLMNPLIDQYLYYLSKTIDGSGQNQQTLKFSVAGPSNMAVQGRNYIPGPSYRQQRVSTTVTQNNNSEFAWPGASSWALNGRNSLMDPGPAMASHKEGEDRFFPLSGSLIFGKQGTGRDNVDADKVMITNEEEIKTTNPVATESYGQVATNHQSAQAQAQTGWVQNQGILPGMVWQDRDVYLQGPIWAKIPHTGGNFHPSPLMGGFGMKHPPPQILIKNTPVPADPPTAFNKDKLNSFITQYSTGQVSVEIEWELQKENSKRWNPEIQYTSNYYKSNNVEFAVNTEGVYSEPRPIGTRYLTRNL

SEQ ID NO: 726 - protein, 736 aa, Artificial Sequence
  source: /note="Description of Artificial Sequence: Synthetic polypeptide"
MAADGYLPDWLEDNLSEGIREWWALKPGAPQPKANQQHQDNARGLVLPGYKYLGPGNGLDKGEPVNAADAAALEHDKAYDQQLKAGDNPYLKYNHADAEFQERLKEDTSFGGNLGRAVFQAKKRLLEPLGLVEEAAKTAPGKKRPVEQSPQEPDSSAGIGKSGAQPAKKRLNFGQTGDTESVPDPQPIGEPPAAPSGVGSLTMASGGGAPVADNNEGADGVGSSSGNWHCDSQWLGDRVITTSTRTWALPTYNNHLYKQISNSTSGGSSNDNAYFGYSTPWGYFDFNRFHCHFSPRDWQRLINNNWGFRPKRLNFKLFNIQVKEVTDNNGVKTIANNLTSTVQVFTDSDYQLPYVLGSAHEGCLPPFPADVFMIPQYGYLTLNDGSQAVGRSSFYCLEYFPSQMLRTGNNFQFSYEFENVPFHSSYAHSQSLDRLMNPLIDQYLYYLSKTINGSGQNQQTLKFSVAGPSNMAVQGRNYIPGPSYRQQRVSTTVTQNNNSEFAWPGASSWALNGRNSLMNPGPAMASHKEGEDRFFPLSGSLIFGKQGTGRDNVDADKVMITNEEEIKTTNPVATESYGQVATNHQSAQAQAQTGWVQNQGILPGMVWQDRDVYLQGPIWAKIPHTDGNFHPSPLMGGFGMKHPPPQILIKNTPVPADPPTAFNKDKLNSFITQYSTGQVSVEIEWELQKENSKRWNPEIQYTSNYYKPNNVEFAVNTEGVYSEPRPIGTRYLTRNL

SEQ ID NO: 727 - protein, 736 aa, Artificial Sequence
  source: /note="Description of Artificial Sequence: Synthetic polypeptide"
MAADGYLPDWLEDNLSEGIREWWALKPGAPQPKANQQHQDNARGLVLPGYKYLGPGNGLDKGEPVNAADAAALEHNKAYDQQLKAGDNPYLKCNHADAEFQERLKEDTSFGGNLGRAVFQAKKRPLEPLGLVEEAAKTAPGKKRPVEQSPQEPDSSAGIGKSGAQPAKKRLNFGQTGDTESVPDPQPIGEPPAAPSGVRSLTMASGGGAPVADNNEGADGVGSSSGNWHCDSQWLGDRVITTSTRTWALPTYNNHLYKQISNSTSGGSSNDNAYLGYSTPWGYFDFNRFHCHFSPRDWQRLINNNWGFRPKRLNFKLFNIQVKEVTDNNGVKTIANNLTSTVQVFTDSDYQLPYVLGSAHEGCLPPFPADVFMIPQYGYLTLNDGSQAVGRSSFYCLEYFPSQMLRTGNNFQFSYEFENVPFHSSYAHSQSLDRLMNPLIDQYLYYLSKTINGSGQNQQTLKFSVAGPSNMAVQGRNYIPGPSYRQQRVSTTVTQNNNSEFAWPGASSWALNGRNSLMNPGPTMASHKEGEDRFFPLSGSLIFGKQGTGRDNVDADKVMITNEEEIKTTNPVATESYGQVATNHQSAQAQAQTGWVQNQGILPGMVWQDRDVYLQGPIWAKIPHTDGNFHPSPLMGGFGMKHPPPQILIKNTPVPADPPTAFNKDKLNSFITQYSTGQVSVEIEWELQKENSKRWNPEIQYTSNYYKSNNVEFAVNTEGVYSEPRPIGTRYLTRNL

SEQ ID NO: 728 - protein, 736 aa, Artificial Sequence
  source: /note="Description of Artificial Sequence: Synthetic polypeptide"
MAADGYLPDWLEDNLSEGIREWWALKPGAPQPKANQQHQDNARGLVLPGYKYLGPGNGLDKGEPVNAADAAALVHDKAYDQQLKAGDNPYLKCNHADAEFQERLKEDTSFGGNLGRAVFQAKKRLLEPLGLVEEAAKTAPGKKRPVEQSPQEPDSSAGIGKSGAQPAKKRLNFGQTGDTESVPDPQPIGEPPAAPSGVGSLTMASGGGAPVADNNEGADGVGSSSGNWHCDSQWLGDRVITTSTRTWALPTYNNHLYKQISNSTSGGSSNDNAYLGYSTPWGYFDFNRFHCHFSPRDWQRLINNNWGFRPKRLNFKLFNIQVKEVTDNNGVKTIANNLTSTVQVFTDSDYQLPYVLGSAHEGCLPPFPADVFTIPQYGYLTLNDGSQAVGRSSFYCLEYFPSQMLRTGNNFQFSYEFENVPFHSSYAHSQSLDRLMNPLIDQYLYYLSKTINGSGQNQQTLKFSVAGPSNMAVQGRNYIPGPSYRQQRVSTTVTQNNNSEFAWPGASSWALNGRNSLMNPGPAMASHKEGEDRFFPLSGSLIFGKQGTGRDNVDADKVMITNEEEIKTTNPVATESYGQVATNHQSAQAQAQTGWVQNQGILPGMVWQDRDVYLQGPIWAKIPHTDGNFHPSPLMGGFGMKHPPPQILIKNTPVPADPPTAFNKDKLNSFITQYSTGQVSVEIEWELQKENSKRWNPEIQYTSNYYKSNNVEFAVNTEGVYSEPRPIGPRYLTRNF

SEQ ID NO: 729 - protein, 736 aa, Artificial Sequence
  source: /note="Description of Artificial Sequence: Synthetic polypeptide"
MAADGYLPDWLEDNLSEGIREWWALKPGAPQPKANQQHQDNARGLVLPGYKYLGPGNGLDKGEPVNAADAAALEHNKAYDQQLKAGDNPYLKCNHADAEFQERLKEDTSFGGNLGRAVFQAKKRLLEPLGLVEEAAKTAPGKKRPVEQSPQEPDSSAGIGKSGAQPAKKRLNFGQTGDTESVPDPQPIGEPPAAPSGVRSLTMASGGGAPVADNNEGADGVGSSSGNWHCDSQWLGDRVITTSTRTWALPTYNNHLYKQISNSTSGGSSNDNAYLGYSTPWGYFDFNRFHCHFSPRDWQRLINNNWGFRPKRLNFKLFNIQVKEVTDNNGVKTIANNLTSTVQVFTDSDYQLPYVLGSAHEGCLPPFPADVFMIPQYGYLTLNDGSQAVGRSSFYCLEYFPSQMLRTGNNFQFSYEFENVPFHSSYAHSQSLDRLMNPLIDQYLYYLSKTINGSGQNQQTLKFSVAGPSNMAVQGRNYIPGPSYRQQRVSTTVTQNNNSEFAWPGASSWALNGRNSLMNPGPAMASHKEGEDRFFPLSGSLIFGKQGTGRDNVDADKVMITNEEEIKTTNPVATESYGQVATNHQSAQAQAQTGWVQNQGILPGMVWQDRDVYLQGPIWAKIPHTDGNFHPSPLMGGFGMKHPPPQILIKNTPVPADPPTAFNKDKLNSFITQYSTGQVSVEIEWELQKENSKRWNPEIQYTSNYYKSNNVEFAVNTEGVYSEPRPIGTRYLTRNL

SEQ ID NO: 730 - protein, 736 aa, Artificial Sequence
  source: /note="Description of Artificial Sequence: Synthetic polypeptide"
MAADGYLPDWLEDNLSEGIREWWALKPGAPQPKANQQHQDNARGLVLPGYKYLGPGNGLDKGEPVNAADAAALEHDKAYDQQLKAGDNPYLKCNHADAEFQERLKEDTSFGGNLGRAVFQAKKRLLEPLGLVEEAAKTAPGKKRPVEQSPQEPDSSAGIGKSGAQPAKKRLNFGQTGDTESVPDPQPIGEPPAAPSGVGSLTMASGGGAPVADNNEGADGVGSSSGNWHCDSQWLGDRVITTSTRTWALPTYNNHLYKQISNSTSGGSSNDNAYLGYSTPWGYFDFNRFHCHFSPRDWQRLINNNWGFRPKRLNFELFNIQVKEVTDNNGVKTIANNLTSTVQVFTDSDYQLPYVLGSAHEGCLPPFPADVFMIPQYGYLTLNDGSQAVGRSSFYCLEYFPSQMLRTGNNFQSSYEFENVPFHSSYAHSQSLDRLMNPLIDQYLYYLSKTINGSGQNQQTLKFSVAGPSNMAVQGRNYIPGPSYRQQRASTTVTQNNNSEFAWPGASSWALNGRNSLMNPGPAMASHKEGEDRFFPLSGSLIFGKQGTGRDNVDADKVMITNEEEIKTTNPVATESYGQVATNHQSAQAQAQTGWVQNQGILPGMVWQDRDVYLQGPIWAKIPHTDGNFHPSPLMGGFGMKHPPPQILIKNTPVPADPPTAFNKDKLNSFITQYSTGQVSVEIEWELQKENSKRWNPEIQYTSNYYKSNNVEFAVNTEGVYSEPRPIGTRYLTRNL

SEQ ID NO: 731 - protein, 736 aa, Artificial Sequence
  source: /note="Description of Artificial Sequence: Synthetic polypeptide"
MAADGYLPDWLEDNLSEGIREWWALKPGAPQPKANQQHQDNARGLVLPGYKYLGPGNGLDKGEPVNAADAAALEHDKAYDQQLKAGDNPYLKCNHADAEFQERLKEDTSFGGNLGRAVFQAKKRLLEPLGLVEEAAKTAPGKKRPVEQSPQEPDSSAGIGKSGAQPAKKRLNFGQTGDTESVPDPQPIGEPPAAPPGVGSLTMASGGGAPVADNNEGADGVGSSSGNWHCDSQWLGDRVITTSTRTWALPTYNNHLYKQISNSTSGGSSNDNAYLGYSTPWGYFDFNRFHCHFSPRDWQRLINNNWGFRPKRLNFKLFNIQVKEVTDNNGVKTIANNLTSTVQVFTDSDYQLPYVLGSAHEGCLPPFPADVFMIPQYGYLTLNDGSQAVGRSSFYCLEYFPSQMLRTGNNFQFSYEFENVPFHSSYAHSQSLDRLMNPLIDQYLYYLSKTISGSGQNQQTLKFSVAGPSNMAVQGRNYIPGPSYRQQRVSTTVTQNNSSEFAWPGASSWALNGRNSLMNPGPAMASHKEGEDRFFPLSGSLIFGKQGTGRDNVDADKVMITNEEEIKTTNPVATESYGQVATNHQSAQAQAQTGWVQNQGILSGMVWQDRDVYLQGPIWAKIPHTDGNFHPSPLMGGFGMKHPPPQILIKNTPVPADPPTAFNKDKLNSFITQYSTGQVSVEIEWELQKENSKRWNPEIQYTSNYYKSNNVEFAVNTEGVYSEPRPIGTRYLTRNL

SEQ ID NO: 732 - protein, 736 aa, Artificial Sequence
  source: /note="Description of Artificial Sequence: Synthetic polypeptide"
MAADGYLPDWLEDNLSEGIREWWALKPGAPQPKANQQHQDNARGLVLPGYKYLGPGNGLDKGEPVNAADAAALEHDKAYDQQLKAGDNPYLKCNHADAEFQERLKEDTSFGGNLGRAVFQAKKRLLEPLGLVEEAAKTAPGKKRPVEQSPQEPDSSAGIGKSGAQPAKKRLNFGQTGDTESVPDPQPIGEPPAAPSGVGSLTMASGGGAPVADNNEGADGVGSSSGNWHCDSQWLGDRVITTSTRTWALPTYNNHLYKQISNSTSGGSSNDNAYLGYSTPWGYFDFNRFHCHFSPRDWQRLINNNWGFRPKRLNFKLFNIQVKEVTDNNGVKTIANNLTSTVQVFTDSDYQLPYVLGSAHEGCLPPFPADVFMIPQYGYLTLNDGSQAVGRSSFYCLEYFPSQMLRTGNNFQFSYEFENVPFHSSYAHSQSLDRLMNPLIDQYLYYLSKTINGSGQNQQTLKFSVAGPSNMAVQGRNYIPGPSYRQQRVSTTVTQNNNSEFAWPGASSWALNGRNSLMNPGPAMASHKEGEDRFFPLSGSLIFGKQGTGRDNVDADKVMITNEEEIKTTNPVATESYGQVATNHQSAQAQAQTGWVQNQGILPGMVWQDRDVYLQGPIWAKIPHTDGNFHPSPLMGGFGMKHPPPQILIKNTPVPADPPTAFNKDKLNSFITQYSTGQVSVEIEWELQKENSKRWNPEIQYTSNYYKSNNVEFAVNTEGVYSEPRPIGTRYLTRNL

SEQ ID NO: 733 - protein, 736 aa, Artificial Sequence; identical to SEQ ID NO: 732
  source: /note="Description of Artificial Sequence: Synthetic polypeptide"

SEQ ID NO: 734 - protein, 736 aa, Artificial Sequence
  source: /note="Description of Artificial Sequence: Synthetic polypeptide"
MAADGYLPDWLEDNLSEGIREWWALKPGAPQPKANQQHQDNARGLVLPGYKYLGPGNGLDKGEPVNAADAAALEHDKAYDQQLKAGDNPYLKCNHADAEFQERLKEDTSFGGNLGRAVFQAKKRLLEPLGLVEEAAKTAPGKKRPVEQSPQEPDSSAGIGKSGAQPAKKRLNFGQTGDTESVPDPQPIGEPPAAPSGVGSLTMASGGGAPVADNNEGADGVGSSSGNWHCDSQWLGDRVITTSTRTWALPTYNNHLYKQISNSTSGGSSNDNAYLDYSTPWGYFDFNRFHCHFSPRDWQRLINNNWGFRPKRLNFKLFNIQVKEVTDNNGVKTIANNLTSTVQVFTDSDYQLPYVLGSAHEGCLPPFPADVFMIPQYGYLTLNDGSQAVGRSSFYCLEYFPSQMLRTGNNFQFSYEFENVPFHSSYAHSQSLDRLMNPLIDQYLYYLSKTINGSGQNQQTLKFSVAGPSNMAVQGRNYIPGPSYRQQRVSTTVTQNNNSEFAWPGASSWALNGRNSLMNPGPAMASHKEGEDRFFPLSGSLIFGKQGTGRDNVDADKVMITNEEEIKTTNPVATESYGQVATNHQSAQAQAQTGWVQNQGILPGMVWQGRDVYLQGPIWAKIPHTDGNFHPSPLMGGFGMKHPPPQILIKNTPVPADPPTAFNKDKLNSFITQYSTGQVSVEIEWELQKENSKRWNPEIQYTSNYYKSNNVEFAVNTEGVYSEPRPIGTRYLTRNL

SEQ ID NO: 735 - protein, 736 aa, Artificial Sequence; identical to SEQ ID NO: 732
  source: /note="Description of Artificial Sequence: Synthetic polypeptide"

SEQ ID NO: 736 - protein, 736 aa, Artificial Sequence
  source: /note="Description of Artificial Sequence: Synthetic polypeptide"
MAADGYPPDWLEDNLSEGIREWWALKPGAPQPKANQQHQDNARGLVLPGYKYLGPGNGLDKGEPVNAADAAALEHDKAYDQQLKAGDNPHLKYNHADAEFQERLKEDTSFGGNLGRAVFQAKKRLLEPLGLVEEAAKTAPGKKRPVEQSPQEPDSSAGIGKSGAQPAKKRLNFGQTGDTESVPDPQPIGEPPAAPSGVGSLTMASGGGAPVADNNEGADGVGSSSGNWHCDSQWLGDRVITTSTRTWALPTYNNHLYKQISNSTSGGSSNDNAYFGYSTPWGYFDFNRFHCHFSPRDWQRLINNNWGFRPKRLNFKLFNIQVKEVTDNNGVKTIANNLTSTVQVFTDSDYQLPYVLGSAHEGCLPPFPADVFMIPQYGYLTLNDGSQAVGRSSFYCLEYFPSQMLRTGNNFQFSYEFENVPFHSSYAHSQSLDRLMNPLIDQYLYYLSKTINGSGQNQQTLKFSVAGPSNMAVQGRNYIPGPSYRQQRVSTTVTQNNNSEFAWPGASSWALNGRNSLMNPGPAMASHKEGEDRFFPLSGSLIFGKQGTGRDNVDADKVMITNEEEIKTTNPVATESYGQVATNHQSAQAQAQTGWVQNQGILPGMVWQDRDVYLQGPIWAKIPHTDGNFHPSPLMGGFGVKHPPPQILIKNTPVPADPPTAFNKDRLNSFITQYSTGQVSVEIEWELQKENSKRWNPEIQYTSNYYKSNNVEFAVNTEGVYSEPRPIGTRYLTRNL

SEQ ID NO: 737 - protein, 736 aa, Artificial Sequence
  source: /note="Description of Artificial Sequence: Synthetic polypeptide"
MAADGYLPDWLEDNLSEGIREWWALKPGAPQPKANQQHQDNARGLVLPGYKYLGPGNGLDKGEPVNAADAAALEHDKAYDQQLKAGDNPYLKYNHADAEFQERLKEDTSFGGNLGRAVFQAKKRLLEPLGLVEEAAKTAPGKKRPVEQSPQEPDSSAGIGKSGAQPAKKRLNFGQTGDTESVPDPQPIGEPPAAPSGVGSLTMASGGGAPVADNNEGADGVGSSSGNWHCDSQWLGDRVITTSTRTWALPTYNNHLYKQISNSTSGGSSNDNAYFGYSTPWGYFDFNRFHCHFSPRDWQRLINNNWGFRPKRLNFKLFNIQVKEVTDNNGVKTIANNLTSTVQVFTDSDYQLPYVLGSAHEGCLPPFPADVFMIPQYGYLTLNDGSQAVGRSSFYCLEYFPSQMLRTGNNFQFSYEFENVPFHSSYAHSQSLDRLMNPLIDQYLYYLSKTINGSGQNQQTLKFSVAGPSNMAVQGRNYIPGPSYRQQRVSTTVTQNNNSEFAWPGASSWALNGRNSLMNPGPAMASHKEGEDRFFPLSGSLIFGKQGTGRDNVDADKVMITNEEEIKTTNPVATESYGQVATNHQSAQAQAQTGWVQNQGILPGMVWQDRDVYLQGPIWAKIPHTDGNFHPSPLMGGFGVKHPPPQILIKNTPVPADPPTAFNKDKLNSFITQYSTGQVSVEIEWELQKENSKRWNPEIQYTSNYYKSNNVEFAVNTEGVYSEPRPIGTRYLTRNL

SEQ ID NO: 738 - protein, 736 aa, Artificial Sequence
  source: /note="Description of Artificial Sequence: Synthetic polypeptide"
MAADGYLPDWLEDNLSEGIREWWALKPGAPQPKANQQHQDNARGLVLPGYKYLGPGNGLDKGEPVNAADAAALEHDKAYDQQLKAGDNPYLKYNHADAEFQERLKEDTSFGGNLGRAVFQAKKRLLEPLGLVEEAAKTAPGKKRPVEQSPQEPDSSAGIGKSGAQPAKKRLNFGQTGDTESVPDPQPIGEPPAAPSGVGSLTMASGGGAPVADNNEGADGVGSSSGNWHCDSQWLGDRVITTSTRTWALPTYNNHLYKQISNSTSGGSSNDNAYFGYSTPWGYFDFNRFHCHFSPRDWQRLTNNNWGFRPKRLNFKLFNIQVKEVTDNNGVKTIANNLTSTVQVFTDSDYQLPYVLGSAHEGCLPPFPADVFMIPQYGYLTLNDGSQAVGRSSFYCLEYIPSQMLRTGNNFQFSYEFENVPFHSSYAHSQSLDRLMNPLIDQYLYYLSKTINGSGQNQQTLKFSVAGPSNMAVQGRNYIPGPSYRQQRVSTTVTQNNNSEFAWPGASSWALNGRNSLMNPGPAMASHKEGEDRFFPLSGSLIFGKQGTGRDNVDADKVMITNEEEIKTTNPVATESYGQVATNHQSAQAQAQTGWVQNQGILPGMVWQDRDVYLQGPIWAKIPHTDGNFHPSPLMGGFGVKHPPPQILIKNTPVPADPPTAFNKDKLNSFITQYSTGQVSVEIEWELQKENSKRWNPEIQYTSNYYKSNNVEFAVNTEGVYSEPRPIGTRYLTRNL

SEQ ID NO: 739 - protein, 736 aa, Artificial Sequence
  source: /note="Description of Artificial Sequence: Synthetic polypeptide"
MAADGYLPDWLEDNLSEGIREWWALKPGAPQPKANQQHQDNARGLVLPGYKYLGPGNGLDKGEPVNAADAAALEHDKAYDQQLKAGDNPYLKYNHADAEFQERLKEDTSFGGNLGRAVFQAKKRLLEPLGLVEEAAKTAPGKKRPVEQSPQEPDSSAGIGKSGAQPAKKRLNFGQTGDTESVPDPQPIGEPPAAPSGVGSLTMASGGGAPVADNNEGADGVGSSSGNWHCDSQWLGDRVITTSTRTWALPTYNNHLYKQISNSTSGGSSNDNAYFGYSTPWGYFDFNRFHCHFSPRDWQRLINNNWGFRPKRLNFKLFNIQVKEVTDNNGVKTIANNLTSTVQVFTDSDYQLPYVLGSAHEGCLPPFPADVFMIPQYGYLTLNDGSQAVGRSSFYCLEYFPSQMLRTGNNFQFSYEFENVPFHSSYAHSQSLDRLMNPLIDQYLYYLSKTINGSGQNQQTLKFSVAGPSNMAVQGRNYIPGPSYRQQRVSTTVTQNNNSEFAWPGASSWALNGRNSLMNPGPAMASHKEGEDRFFPLSGSLISGKQGTGRDNVDANKVMITNEEEIKTTNPVATESYGQVATNHQSAQAQAQTGWVQNQGILPGMVWQDRDVYLQGPIWAKIPHTDGNFHPSPLMGGFEMKHPPPQILIKNTPVPADPPTAFNKDKLNSFITQYSTGQVSVEIEWELQKENSKRWNPEIQYTSNYYKSNNVEFAVNTEGVYSEPRPIGTRYLTRNL

SEQ ID NO: 740 - protein, 736 aa, Artificial Sequence
  source: /note="Description of Artificial Sequence: Synthetic polypeptide"
MAADGYLPDWLEDNLSEGIREWWALKPGAPQPKANQQHQDNARGLVLPGYKYLGPGNGLDKGEPVNAADAAALEHDKAYDQQLKAGDNPYLKYNHADAEFQERLKEDTSFGGNLGRAVFQAKKRLLEPLGLVEEAAKTAPGKKRPVEQSPQEPDSSAGIGKSGAQPAKKRLNFGQTGDTESVPDPQPIGEPPAAPSGVGSLTIASGGGAPVADNNEGADGVGSSSGNWHCDSQWLGDRVITTSTRTWALPTYNNHLYKRISNSTSGGSSNDNAYFGYSTPWGYFDFNRFHCHFSPRDWQRLINNNWGFRPKRLNFKLFNIRVKEVTDNNGVKTITNNLTSTVQVFTDSDYQLPYVLGSAHEGCLPPFPADVFMIPQYGYLTLNDGSQAVGRSSFYCLEYFPSQMLRTGNNFQFSYEFENVPFHSSYAHSQSLDRLMNPLIDQYLYYLSKTINGSGQNQQTLKFSVAGPSNMAVQGRNYIPGPSYRQQRVSTTVTRNNNSEFAWPGASSWALNGRNSLMNPGPAMASHKEGEDRFFPLSGSLIFGKQGTGRDNVDADKVMITNEEEIKTTNPVATESYGQVATNHQSAQAQAQTGWVQNQGILPGMVWQDRDVYLQGPIWAKIPHTDGNFHPSPLMGGFGVKHPPPQILIKNTPVPADPPTAFNKDKLNSFITQYSTGQVSVEIEWELQKENSKRWNPEIQYTSNYYKSNNVEFAVNTEGVYSEPRPIGTRYLTRNL

SEQ ID NO: 741 - protein, 736 aa, Artificial Sequence
  source: /note="Description of Artificial Sequence: Synthetic polypeptide"
MAADGYLPDWLEDNLSEGIREWWALKPGAPQPKANQQHQDNARGLVLPGYKYLGPGNGLDKGEPVNAADAAALEHDKAYDQQLKAGDNPYLKYNHADAEFQERLKEDTSFGGNLGRAVFQAKKRLLEPLGLVEEAAKTAPGKKRPVEQSPQEPDSSAGIGKSGAQPAKKRLNFGQTGDTEPVPDPQPIGEPPAAPSGVGSLTMASGGGAPVADNNEGADGVGSSSGNWHCDSQWLGDRVITTSTRTWALPTYNNHLYKQISNSTSGGSSNDNAYFGYSTPWGYFDFNRFHCHFSPRDWQRLINNNWGFRPKRLNFKLFNIQVKEVTDNNGVKTIANNLTSTVQVFTDSDYQLPYVLGSAHEGCLPPFPAGVFMIPQYGYLTLNDGSQAVGRSSFYCLEYFPSQMLRTGNNFQFSYEFENVPFHSSYAHSQSLDRLMNPLIDQYLYYLSKTINGSGQNQQTLKFSVAGPSNMAVQGRNYIPGPSYRQQRVSTTATQNNNSEFAWPGASSWALNGRNSLMNPGPAMASHKEGEDRFFPLSGSLIFGKQGTGRDNVDADKVMITNEEEIKTTNPVATESYGQVATNHQSAQAQAQTGWVQNQGILPGMVWQDRDVYLQGPIWAKIPHTDGNFHPSPLMGGFGMKHPPPQILIKNTPVPADPPTAFNKDKLNSFITQYSTGQVSVEIEWELQKENSKRWNPEIQYTSNYYKSNNVEFAVNTEGVYSEPRPIGTRYLTRNL

SEQ ID NO: 742 - protein, 736 aa, Artificial Sequence
  source: /note="Description of Artificial Sequence: Synthetic polypeptide"
MAADGYLPDWLEDNLSEGIREWWALKPGAPQPKANQQHQDNARGLVLPGYKYLGPGNGLDKGEPVNAADAAALEHDKAYDQQLKAGDNPYLKYNHADAGFQERLKEDTSFGGNLGRAVFQAKKRLLEPLGLVEEAAKTAPGKKRPVEQSPQEPDSSAGIGKSGAQPAKKRLNFGQTGDTESVPVPQPIGEPPAAPSGVGSLTMASGGGAPVADNNEGADGVGSSSGNWHCDSQWLGDRVITTSTRTWALPTYNNHLYKQISNSTSGGSSNDNAYFGYSTPWGYFDFNRFHCHFSPRDWQRLINNNWGFRPKRLNFKLFNIQVKEVTDNNGVKTIANNLTSTVQVFTDSDYQLPYVLGSAHEGCLPPFPADVFMIPQYGYLTLNDGSQAVGRSSFYCLEYFPSQMLRTGNNFQFSYEFENVPFHSSYAHSQSLDRLMNPLIDQYLYYLSKTINGSGQNQQTLKFSVAGPSNMAVQGRNYIPGPSYRQQRVSTTVTQNNNSEFAWPGASSWALNGRNSLMNPGPAMASHKEGEDRFFPLSGSLIFGKQGAGRDNVDADKVMITNEEEIKTTNPVATESYGQVATNHQSAQAQAQTGWVQNQGILPGMVWQDRDVYLQGPIWAKIPHTDGNFHPSPLMGGFGMKHPPPQILIKNTPVPADPPTAFNKDKLNSFITQYSTGQVSVEIEWELQKENSKRWNPEIQYTSNYYKSNNVEFAVNTEGVYSEPRPIGTRYLTRNL

SEQ ID NO: 743 - protein, 736 aa, Artificial Sequence
  source: /note="Description of Artificial Sequence: Synthetic polypeptide"
  MOD_RES (126)..(126): Any naturally occurring amino acid
MAADGYLPDWLEDNLSEGIRERWALKPGAPQPKANQQHQDNARGLVLPGYKYLGPGNGLDKGEPVNAADAAALEHDKAYDQQLKAGDNPYLKYNHADAEFQERLKEDTSFGGNLGRAVFQAKKRLXEPLGLVEEAAKTAPGKKRPVEQSPQEPDSSAGIGKSGAQPAKKRLNFGQTGDTESVPDPQPIGEPPAAPSGVGSLTMASGGGAPVADNNEGADGVGSSSGNWHCDSQWLGDRVITTSTRTWALPTYNNHLYKQISNSTSGGSSNDNAYFGYSTPWGYFDFNRFHCHFSPRDWQRLINNNWGFRPKRLNFKLFNIQVKEVTDNNGVKTIANNLTSTVQVFTDSDYQLPYVLGSAHEGCLPPFPADVFMIPQYGYLTLNDGSQAVGRSSFYCLEYFPSQMLRTGNNFQFSYEFENVPFHSSYAHSQSPDRLMNPLIDQYLYYLSKTINGSGQNQQTLKFSVAGPSNMAVQGRNYIPGPSYRQQRVSTTVTQNNNSEFAWPGASSWALNGRNSLMNPGPAMASHKEGEDRFFPLSGSLIFGKQGTGRDNVDADKVMITNEEEIKTTNPVATESYGQVATNHQSAQAQAQTGWVQNQGILPGMVWQDRDVYLQGPIWAKIPHTDGNFHPSPLMGGFGVKHPPPQILIKNTPVPADPPTAFNKDKLNSFITQYSTGQVSVEIEWELQKENSKRWNPEIQYTSNYYKSNNVEFAVNTEGVYSEPRPIGTRYLTRNL

SEQ ID NO: 744 - protein, 736 aa, Artificial Sequence
  source: /note="Description of Artificial Sequence: Synthetic polypeptide"
MAADGYLPDWLEDNLSEGIREWWALKPGAPQPKANQQHQDNARGLVLPGYKYLGPGNGLDKGEPVNAADAAALEHDKAYDQQLKAGDNPYLKYNHADAEFQERLKEDTSFGGNLGRAVFQAKKRLLEPLGLVEEAAKTAPGKKRPVEQSPQEPDSSAGIGKSGAQPAKKRLNFGQTGDTESVPDPQPIGEPPAAPSGVGSLTMASGGGAPVADNNEGADGVGSSSGNWHCDSQWLGDRVITTSTRTWALPTYNNHLYKQISNSTSGGSSNDNAYLGYSTPWGYFDFNRFHCHFSPRDWQRLINNNWGFRPKRLNFKLFNIQVKEVTDNNGVKTIANNLTSTVQVFTDSDYQLPYVLGSAHEGCLPPFPADVFMIPQYGYLTLNDGSQAVGRSSFYCLEYFPSQMLRTGNNFQFSYEFENVPFHSSYAHSQSLDRLMNPLIDQYLYYLSKTINGSGQNQQTLKFSVAGPSNMAVQGRNYIPGPSYRQQRVSTTVTQNNNSEFAWPGASSWALNGRNSLMNPGPAMASHKEGEDRFFPLSGSLIFGKQGTGRDNVDADKVMITNEEEIKTTNPVATESYGQVATNHQSAQAQAQTGWVQNQGILPGMVWQDRDVYLQGPIWAKIPHTDGNFHPSPLMGGFGMKHPPPQILIKNTPVPADPPTAFNKDKLNSFITQYSTGQVSVEIEWELQKENSKRWNPEIQYTSNYYKSNNVEFAVNTEGVYSEPRPIGTRYLTRNL

SEQ ID NO: 745 - protein, 736 aa, Artificial Sequence
  source: /note="Description of Artificial Sequence: Synthetic polypeptide"
MAADGYLPDWLEDNLSEGIREWWALKPGAPQPKANQQHQDNARGLVLPGYKYLGPGNGLDKGEPVNAADAAALEHDKAYDQQLKAGDNPYLKYNHADAEFQERLKEDTSFGGNLGRAVFQAKKRLLEPLGLVEEAAKTAPGKKRPVEQSPQEPDSSAGIGKSGAQPAKKRLNFGQTGDTESVPDPQPIGEPPAAPSGVGSLTMASGGGAPVADNNEGADGVGSSSGNWHCDSQWLGDRVITTSTRTWALPTYNNHLYKQISNSTSGGSSNDNAYFGYSTPWGYFDFNRFHCHFSPRDWQRLINNNWGFRPKRLNFKLFNIQVKEVTDNNGVKTIANNLTSTVQVFTDSDYQLPYVLGSAHEGCLPPFPADVFMIPQYGYLTLNDGSQAVGRSSFYCLEYFPSQMLRTGNNFQFSYEFENVPFHSSYAHSQSLDRLMNPLIDQYLYYLSKTINGSGQNQQTLKFSVAGPSNMAVQGRNYIPGPSYRQQRVSTTVTQNNNSEFAWPGASSWALNGRNSLMNPGPAMASHKEGEDRFFPLSGSLIFGKQGTGRDNVDADKVMITNEEEIKTTNPVATESYGQVATNHQSAQAQAQTGWVQNQGILPGMVWQDRDVYLQGPIWAKIPHTDGNFHPSPLMGGFGMKHPPPQILIKNTPVPADPPTAFNKDKLDSFITQYSTGQVSVEIEWELQKENSKRWNPVIQYTSNYYKSNNVEFAVNTEGVYSEPRPIGTRYLTRNL

SEQ ID NO: 746 - protein, 736 aa, Artificial Sequence
  source: /note="Description of Artificial Sequence: Synthetic polypeptide"
MAADGYLPDWLEDNLSEGIREWWDLKPGAPKPKANQQKQDDGRGLVLPGYKYLGPFNGLDKGEPVNAADAAALEHDKAYDQQLKAGDNPYLRYNHADAEFQERLQEDTSFGGNLGRAVFQAKKRVLEPLGLVEEGAKTAPGKKRPVEQSPQEPDSSSGIGKTGQQPAKKRLNFGQTGDSESVPDPQPLGEPPATPAAVGPTTMASGGGAPMADNNEGVDGVGNASGNWHCDSTWLGDRVITTSTRTWALPTYNNHLYKQISSASTGASNDNHYFGYSTPWGYFDFNRFHCHFSPRDWQRLINNNWGFRPKRLNFKLFNIQVKEVTTNDGVTTIANNLTSTVQVFSDSEYQLPYVLGSAHQGCLPPFPADVFMIPQYGYLTLNNGSQAVGRSSFYCLEYFPSQMLRTGNNFTFSYTFEEVPFHSSYAHSQSLDRLMNPLIDQYLYYLNRTQNQSGSAQNKDLLFSRGSPAGMSVQPKNWLPGPCYRQQRVSKTKTDNNNSNFTWTGASKYNLNGRESIINPGTAMASHKDDEDKFFPMSGVMIFGKESAGASNTALDNVMITDEEEIKATNPVATERFGTVAVNFQSSSTDPATGDVHAMGALPGMVWQDRDVYLQGPIWAKIPHTDGHFHPSPLMGGFGLKNPPPQILIKNTPVPANPPAEFSATKLASFITQYSTGQVSVEIEWELQKENSKRWNPEVQYTSNYAKSANVDFTVDNNGLYTEPRPIGTRYLTRPL

SEQ ID NO: 747 - protein, 736 aa, Artificial Sequence
  source: /note="Description of Artificial Sequence: Synthetic polypeptide"
MAADGYLPDWLEDNLSEGIREWWDLKPGAPKPKANQQKQDDGRGLVLPGYKYLGPFNGLDKGEPVNAADAAALEHDKAYDQQLKAGDNPYLRYNHADAEFQERLQEDTSFGGNLGRAVFQAKKRVLEPLGLVEEGAKTAPGKRRPVEQSPQEPDSSSGIGKTGQQPAKKRLNFGQTGDSESVPDPQPLGEPPATPAAVGPTTMASGGGAPMADNNEGADGVGNASGNWHCDSTWLGDRVITTSTRTWALPTYNNHLYKQISSASTGASNDNHYFGYSTPWGYFDFNRFHCHFSPRDWQRLINNNWGFRPKRLNFKLFNIQVKEVTTNDGVTTIANNLTSTVQVFSDSEYQLPYVLGSAHQGCLPPFPADVFMIPQYGYLTLNNGSQAVGRSSFYCLEYFPSQMLRTGNNFTFSYTFEEVPFHSSYAHSQSLDRLMNPLIDQYLYYLNRTQNQSGSAQNKDLLFSRGSPAGMSVQPKNWLPGPCYRQQRVSKTKTDNNNSNFTWTGASKYNLNGRESIINPGTAMASHKDDEDKFFPMSGVMIFGKESAGASNTALDNVMITDEEEIKATNPVATERFGTVAVNFQSSSTDPATGDVHAMGALPGMVWQDRDVYLQGPIWAKIPHTDGHFHPSPLMGGFGLKNPPPQILIKNTPVPANPPAEFSATKFASFITQYSTGQVSVEIEWELQKENSKRWNPEVQYTSNYAKSANVDFTVDNNGLYTEPRPIGTRYLTRPL

SEQ ID NO: 748 - protein, 736 aa, Artificial Sequence
  source: /note="Description of Artificial Sequence: Synthetic polypeptide"
MAADGYLPDWLEDNLSEGIREWWDLKPGAPKPKANQQKQDDGRGLVLPGYKYLGPFNGLDKGEPVNAADAAALEHDKAYDQQLKAGDNPYPRYNHADAEFQERLQEDTSFGGNLGRAVFQAKKRVLEPLGLVGEGAKTAPGKKRPVEQSPQEPDSSSGIGKTGQQPAKKRLNFGQTGDSESVPDPQPLGEPPATPAAVGPTTMASGGGAPMADNNEGADGVGNASGNWHCDSTWLGDRVITTSTRTWALPTYNNHLYKQISSASTGASNDNHYFGYSTPWGYFDFNRFHCHFSPRDWQRLINNNWGFRPKRLNFKLFNIQVKEVTTNDGVTTIANNLTSTVQVFSDSEYQLPYVLGSAHQGCLPPFPADVFMIPQYGYLTLNNGSQAVGRSSFYCLEYFPSQMLRTGNNFTFSYTFEEVPFHSSYAHSQSLDRLMNPPIDQYLYYLNRTQNQSGSAQNKDLLFSRGSPAGMSVQPKNWLPGPCYRQQRVSKTKTDNNNSNFTWTGASKYNLNGRESIINPGTAMASHKDDEDKFFPMSGVMIFGKESAGASNTALDNVMITDEEEIKATNPVATERFGTVAVNFQSSSTDPATGDVHAMGALPGMVWQDRDVYLQGPIWAKIPHTDGHFHPSPLMGGFGLKNPPPQILIKNTPVPANPPAEFSATKFASFITQYSTGQVSVEIEWELQKENSKRWNPEVQYTSNYAKSANVDFTVDNNGLYTEPRPIGTRYLTRPL

SEQ ID NO: 749 - protein, 736 aa, Artificial Sequence
  source: /note="Description of Artificial Sequence: Synthetic polypeptide"
MAADGYLPDWLEDNLSEGIREWWDLKPGAPKPKANQQKQDDGRGLVLPGYKYLGPFNGLDKGEPVNAADAAALEHDKAYDQQLKAGDNPYLRYNHADAEFQERLQEDTSFGGNLGRAVFQAKKRVLEPLGLVEEGAKTAPGKKRPVEQSPQEPDSSSGIGKTGQQPAKKRLNFGQTGDSESVPDPRPLGEPPATPAAVGPTTMASGGGAPMADNNEGADGVGNASGNWHCDSTWLGDRVITTSTRTWALPTYNNHLYKQISSASTGASNDNHYFGYSTPWGYFDFNRFHCHFSPRDWQRLINNNWGFRPKRLNFKLFNIQVKEVTTNDGVTTIANNLTSTVQVFSDSEYQLPYVLGSAHQGCLPPFPADVFMIPQYGYLTLNNGSQAVGRSSFYCLEYFPSQMLRTGNNFTFSYTFEEVPFHSSYAHSQSLDRLMNPLIDQYLYYLNRTQNQSGSAQNKDLLFSRGPPAGMSVQPKNWLPGPCYRQQRVSKTKTDNNNSNFTWTGASKYNLNGRESIINPGTAMASHKDDEDKFFPMSGVMIFGKESAGASNTALDNVMITDEEEIKATNPVATERFGTVAVNFQSSSTDPATGDVHAMGALPGMVWQDRDVYLQGPIWAKIPHTDGHFHPSPLMGGFGLKNPPPQILIKNTPVPANPPAEFSATKFASFITQYSTGQVSVEIEWELQKENSKRWNPEVQYTSNYAKSANVDFTVDNNGLYTEPRPIGTRYLTRPL

SEQ ID NO: 750 - protein, 736 aa, Artificial Sequence
  source: /note="Description of Artificial Sequence: Synthetic polypeptide"
MAADGYLPDWLEDNLSEGIREWWDLKPGAPKPKANQQKQDDGRGLVLPGYKYLGPFNGLDKGEPVNAADAAALEHDKAYDQQLKAGDNPYLRYNHADAEFQERLQEDTSFGGNLGRAVFQAKKRVLEPLGLVEEGAKTAPGKKRPVEQSPQEPDSSSGIGKTGQQPAKKRLNFGQTGGSESVPDPQPLGEPPATPAAVGPTTMASGGGAPMADNNEGADGVGNASGNWHCDSTWLGDRVITTSTRTWALPTYNNHLYKQISSASTGASNDNHYFGYSTPWGYFDFNRFHCHFSPRDWQRLINNNWGFRPKRLNFKLFNIQVKEVTTNDGVTTIANNLTSTVQVFSDSEYQLPYVLGSAHQGCLPPFPADVFMIPQYGYLTLNNGSQAVGRSSFYCLEYFPSQMLRTGNNFTFSYTFEEVPFHSSYAHSQSLDRLMNPPIDQYLYYLNRTQNQSGSAQNKDLLFSRGSPAGMSVQPKNWLPGPCYRQQRVSKTKTDNNNSNFTWTGASKYNLNGRESIINPGTAMASHKDDEDKFFPMSGVMIFGKESAGASNTALDNVMITDEEEIKATNPVATERFGTVAVNFQSSSTDPATGDVHAMGALPGMVWQDRDVYLQGPIWAKIPHTDGHFHPSPLMGGFGLKNPPPQILIKNTPVPANPPAEFSATKFASFITQYSTGQVSVEIEWELQKENSKRWNPEVQYTSNYAKSANVDFTVDNNGLYTEPRPIGTRYLTRPL

SEQ ID NO: 751 - protein, 736 aa, Artificial Sequence
  source: /note="Description of Artificial Sequence: Synthetic polypeptide"
MAADGYLPDWLEDNLSEGIREWWDLKPGAPKPKANQQKQDDGRGLVLPGYKYLGPFNGLDKGEPVNAADAAALEHDKAYDQQLKAGDNPYLRYNHADAEFQERLQEDTSFGGNLGRAVFQAKKRVLEPLGLVEEGAKTAPGKKRPVEQSPQEPDSSSGIGKTGQQPAKKRLNFGQTGDSESVPDPQPLGEPPATPAAVGPTTMASGGGAPMADNNEGADGVGNASGNWHCDSTWLGDRVITTSTRTWALPTYNNHLYKQISSASTGASNDNHYFGYSTPWGYFDFNRFHCHFSPRDWQRLINNNWGFRPKRLNFKLFNIQVKEVTTNDGVTTIANNLTSTVQVFSDSEYQLPYVLGSAHQGCLPPFPADVFMIPQYGYLTLNNGSQAVGRSSFYCLEYFPSQMLRTGNNFTFSYTFEEVPFHSSYAHSQSLDRLMNPLIDQYLYYLNRTQNQSGSAQNKDLLFSRGSPAGMSVQPKNWLPGPCYRQQRVSKTKTDNNNSNFTWTGASKYNLNGRESIINPGTAVASHKDDEDKFFPMSGVMIFGKESAGASNTALDNVMITDEEEIKATNPVATERFGTVAVNFQSSSTDPATGDVHAMGALPGMVWQDRDVYLQGPIWAKIPHTDGHFHPSPLMGGFGLKNPPPQILIKNTPVPANPPAEFSATKFASFITQYSTGQVSVEIEWELQKENSKRWNPEVQYTSNYAKSANVDFTVDNNGLYTEPRPIGTRYLTRPL

SEQ ID NO: 752 - protein, 736 aa, Artificial Sequence
  source: /note="Description of Artificial Sequence: Synthetic polypeptide"
MAADGYLPDWLEDNLSEGIREWWDLKPGAPKPKANQQKQDDGRGLVLPGYKYLGPFNGLDKGEPVNAADAAALEHDKAYDQQLKAGDNPYLRYNHADAEFQERLQEDTSFGGNLGRAVFQAKKRVLEPLGLVEEGAKTAPGKKRPVEQSPQEPDSSSGIGKTGQQPAKKRLNFGQTGDSESVPDPQPLGEPPATPAAVGPTTMASGGGAPMADNNEGADGVGNASGNWHCDSTWLGDRVITTSTRTWALPTYNNHLYKQISSASTGASNDNHYFGYSTPWGYFDFNRFHCHFSPRDWQQLINNNWGFRPKRLNFKLFNIQVKEVTTNDGVTTIANNLTSTVQVFSDSEYQLPYVLGSAHQGCLPPFPADVFMIPQYGYLTLNNGSQAVGRSSFYCLEYFPSQMLRTGNNFTFSYTFEEVPFHSSYAHSQSLDRLMNPLIDQYLYYLNRTQNQSGSAQNKDLLFSRGSPAGMSVQPKNWLPGPCYRQQRVSKTKTDNNNSNFTWTGASKYNLNGRESIINPGTAMASHKDDEDKFFPMSGVMIFGKESAGASNTALDNVMITDEEEIKATNPVATERFGTVAVNFQSTSTDPATGDVHAMGALPGMVWQDRDVYLQGPIWAKIPHTDGHFHPSPLMGGFGLKNPPPQILIKNTPVPANPPAEFSATKFASFITQYSTGQVSVEIEWELQKENSKRWNPEVQYTSNYAKSADVDFTVDNNGLYTEPRPIGTRYLTRPL

SEQ ID NO: 753 - protein, 736 aa, Artificial Sequence
  source: /note="Description of Artificial Sequence: Synthetic polypeptide"
MAADGYLPDWLEDNLSEGIREWWDLKPGAPKPKANQQKQDDGRGLVLPGYKYLGPFNGLDKGEPVNAADAAALEHDKAYDQQLKAGDNPYLRYNHADAEFQERLQEDTSFGGNLGRAVFQAKKRVLEPLGLVEEGAKTAPGKKRPVEQSPQEPDSSSGIGKTGQQPAKKRLNFGQTGDSESVPDPQPLGEPPATPAAVGPTTMASGGGAPMADNNEGADGVGNASGNWHCDSTWLGDRVITTSTRTWALPTYNNHLYKQISSASTGASNDNHYFGYSTPWGYFDFNRFHCHFSPRDWQRLINNNWGFRPKRLNFKLFNIQVKEVTTNDGVTTIANNLTSTVQVFSDSEYQPPYVLGSAHQGCLPPFPADVFMIPQYGHLTLNNGSQAVGRSSFYCLEYFPSQMLRTGNNFTFSYTFEEVPFHSSYAHSQSLDRLTNPLIDQYLYYLNRTQNQSGSAQNKDLLFSRGSPAGMSVQPKNWLPGPCYRQQRVSKTKTDNNNSNFTWTGASKYNLNGRESIINPGTAMASHKDDEDKFFPMSGVMIFGKESAGASNTALDNVMITDEEEIKATNPVATERFGTVAVNFQSSSTDPATGDVHAMGALPGMVWQDRDVYLQGPIWAKIPHTDGHFHPSPLMGGFGLKNPPPQILIKNTPVPANPPAEFSATKFASFITQYSTGQVSVEIEWELQKENSKRWNPEVQYTSNYAKSANVDFTVDNNGLYTEPRPIGTRYLTRPL

SEQ ID NO: 754 - protein, 736 aa, Artificial Sequence
  source: /note="Description of Artificial Sequence: Synthetic polypeptide"
MAADGYLPDWLEDNLSEGIREWWDLKPGAPKPKANQQEQDDGRGLVLPGYKYLGPFNGLDKGEPVNAADAAALEHDKAYDQQLKAGDNPYLRYNHADAEFQERLQEDTSFGGNLGRAVFQAKKRVLEPLGLVEEGAKTAPGKKRPVEQSPQEPDSSSGIGKTGQQPAKKRLNFGQTGDSESVPDPQPLGEPPATPAAVGPTTMASGGGAPMADNNEGADGVGNASGNWHCDSTWLGDRVITTSTRTWALPTYNNHLYKQISSASTGASNDNHYFGYSTPWGYFDFNRFHCHFSPRDWQRLINNNWGFRPKRLNFKLFNIQVKEVTTNDGVTTIANNLTSTVQVFSDSEYQLPYVLGSAHQGCLPPFPADVFMIPQYGYLTLNNGSQAVGRSSFYCLEYFPSQMLRTGNNFTFSYTFEEVPFHSSYAHSQSLDRLMNPLIDQYLYYLNRTQNQSGSAQNKDLLFSRGSPAGMSVQPKNWLPGPCYRQQRVSKTKTDNNNSNFTWTGASKYNLNGRESIINPGTAMASHKDDEDKFFPMSGVMIFGKESAGASNTALDNVMITDEEEIKATNPVATERFGTVAVNFQSSSTDPATGDVHATGTLPGMVWQDRDVYLQGPIWAKIPHTDGHFHPSPLMGGFGLKNPPPQILIKTTPVPANPPAEFSATKFASFITQYSTGQVSVEIEWELQKENSKRWNPEVQYTSNYAKSANVDFTVDDNGLYTEPRPIGTRYLTRPL

SEQ ID NO: 755 - protein, 736 aa, Artificial Sequence
  source: /note="Description of Artificial Sequence: Synthetic polypeptide"
MAADGYLPDWLEDNLSEGIREWWDLKPGAPKPKANQQKQDDGRGLVLPGYKYLGPFNGLDKGEPVNAADAAALEHDKAYDQQLKAGDNPYLRYNHADAEFQERLQEDTSFGGNLGRAVFQAKKRVLEPLGLVEEGAKTAPGKKRPVEQSLQEPDSSSGIGKTGQQPAKKRLNFGQTGDSESVPDPQPLGEPPATPAAVGPTTMASGGGAPMADNNEGADGVGNASGNWHCDSTWLGDRVITTSTRTWALPTYNNHLYKQISSASTGASNDNHYFGYSTPWGYFDFNRFHCHFSPRDWQRLINNNWGFRPKRLNFKLFNIQVKEVTTNDGVTTIANNLTSTVQVFSDSEYQLPYVLGSAHQGCLPPFPADVFMIPQYGYLTLNNGSQAVGRSSFYCLEYFPSQMLRTGNNFTFSYTFEEVPFHSSYAHSQSLDRLMNPLIDQYLYYLNRTQNQSGSAQNKDLLFSRGSPAGMSVQPKNWLPGPCYRQQRVSKTKTDNDNSNFTWTGASKYNLNGRESIINPGTAMASHKDDEDKFFPMSGVMIFGKESAGASNTALDNVMITDEEEIKATNPVATERFGTVAVNFQSSSTDPATGDVHAMGALPGMVWQDRDVYLQGPIWAKIPHTDGHFHPSPLMGGFGLKNPPPQILIKNTPVPANPPAEFSATKFASFITQYSTGQVSVEIEWELQKENSKRWNPEVQYTSNYAKSANVDFTVDNNGLYTEPRPIGTRYLTRPL

SEQ ID NO: 756 - protein, 736 aa, Artificial Sequence
  source: /note="Description of Artificial Sequence: Synthetic polypeptide"
MAADGYLPDWLEDNLSEGIREWWDLKPGAPKPKANQQKQDDGRGLVLPGYKYLGPFNGLDKGEPVNAADAAALEHDKAYDQQLKAGDNPYLRYNHADAEFQERLQEDTSFGGNLGRAVFQAKKRVLEPLGLVEEGAKTAPGKKRPVEQSPQEPDSSSGIGKTGQQPAKKRLNFGQTGDSESVPDPQPLGEPPATPAAVGPTTMASGGGAPMADNNEGADGVGNASGNWHCDSTWLGDRVITTSTRTWALPTYNNHLYKQISSASTGASNDNHYFGYSTPWGYFDFNRFHCHFSPRDWQRLINNNWGFRPKRLNFKLFNIQVKEVTTNDGVTTIANNLTSTVQVFSDSEYQLPYVLGSAHQGCLPPFPADVFMIPQYGYLTLNNGSQAVGRSSFYCLEYFPSQMLRTGNNFTFSYTFEEAPFHSSYAHSQSLDRLMNPLIDQYLYYLNRTQNQSGSAQNKDLLFSRGSPAGMSVQPKNWLPGPCYRQQRVSKTKTDNNNSNFTWTGASKYNLNGRESIINPGTAMASHKDDEDKFFPMSGVMIFGKESAGASNTALDNVMITDEEEIKATNPVATERFGTVAVNFQSSSTDPATGDVHAMGALPGMVWQDRDVYLQGPIWAKIPHTDGHFHPSPLMGGFGLKNPPPQILIKNTPVPANPPAEFSATKFASFITQYSTGQVSVEIEWELQKENSKRWNPEVQYTSNYAKSANVDFTVDNNGLYTEPRPVGTRYLTRPL

SEQ ID NO: 757 - protein, 736 aa, Artificial Sequence
  source: /note="Description of Artificial Sequence: Synthetic polypeptide"
MAADGYLPDWLEDNLSEGIREWWDLKPGAPKPKANQQKQDDGRGLVLPGYKYLGPFNGLDKGEPVNAADAAALEHDKAYDQQLKAGDNPYLRYNHADAEFQERLQENTSFGGNLGRAVFQAKKRVLEPLGLVEEGAKTAPGKKRPVEQSPQEPDSSSGIGKTGQQPAKKRLNFGQTGDSESVPDPQPLGEPPATPAAVGPTTMASGGGAPMADNNEGADGVGNASGNWHCDSTWLGDRVITTSTRTWALPTYNNHLYKQISSASTGASNDNHYFGYSTPWGYFDFNRFHCHFPPRDWQRLINNNWGFRPKRLNFKLFNIQVKEVTSNDGVTTIANNLTSTVQVFSDSEYQLPYVLGSAHQGCLPPFPADVFMIPQYGYLTLNNGSQAVGRSSFYCLEYFPSQMLRTGNNFTFSYTFEEVPFHSSYAHSQSLDRLMNPLIDQYLYYLNRTQNQSGSAQNKDLLFSRGSPAGMSVQPKNWLPGPCYRQQRVSKTKTDNNNSNFTWTGASKYNLNGRESIINPGTAMASHKDDEDKFFPMSGVMIFGKESAGASNTALDNVMITDEEEIKATNPVATERFGTVAVNFQSSSTDPATGDVHAMGALPGMVWQDRDVYLQGPIWAKIPHTDGHFHPSPLMGGFGLKNPPPQILIKNTPVPANPPAEFSATKFASFITQYSTGQVSVEIEWELQKENSKRWNPEVQYTSNYAKSANVDFTVDNNGLYTEPRPIGTRYLTRPL

SEQ ID NO: 758 - protein, 736 aa, Artificial Sequence
  source: /note="Description of Artificial Sequence: Synthetic polypeptide"
MAADGYLPDWLEDNLSEGIREWWDLKPGAPKPKANQQKQDDGRGLVLPGYKYLGPFNGLDKGEPVNAADAAALEHDKAYDQQLKAGDNPYLRYNHADAEFQERLQEDTSFGGNLGRAVFQAKKRVLEPLGLVEEGAKTAPGKKRPVEQSPQEPDSSSGIGKTGQQPAKKRLNFGQTGDSESVPDPQPLGEPPATPAAVGPTTMASGGGAPMADNNEGADGVGNASGNWHCDSTWLGDRVITTSTRTWALPTYNNHLYKQISSASTGASNDNHYFGYSTPWGYFDFNRFHCHFSPRDWQRLINNNWGFRPKRLNFKLFNIQVKEVTTNDGVTTIANNLTSTVQVFSDSEYQLPYVLGSAHQGCLPPFPADVFMIPQYGYLTLNNGSQAVGRSSFYCLEYFPSQMLRTGNNFTFSYTFEEVPFHSSYAHSQSLDRLMNPLIDQYLYYLNRTQNQSGSAQNKDLLFSRGSPAGTSVQPKNWLPGPCYRQQRVSKTKTDNNNSNFTWTGASKYNLNGRESIINPGTAMASHKDDEDKFFPMSGVMIFGKESAGASNTALDNVMITDEEEIKATNPVATERFGTVAVNFQSSSTDPATGDVHAMGALPGMVWQDRDVYLQGPIWAKIPHTDGHFHPSPLMGGFGLKNPPPQILIKNTPVPANPPAEFSATKFASFITQYSTGQVSVEIEWELQKENSKRWNPEVQYTSNYAKSANVDFTVDNNGLYTGPRPIGTRYLTRPL

SEQ ID NO: 759 - protein, 736 aa, Artificial Sequence
  source: /note="Description of Artificial Sequence: Synthetic polypeptide"
MAADGYLPDWLEDNLSEGIREWWDLKPGAPKPKANQQKQDDGRGLVLPGYKYLGPFNGLDKGEPVNAADAAALEHDKAYDQQLKAGDNPYLRYNHADAEFQERLQEDTSFGGNLGRAVFQAKKRVLEPLGLVEEGAKTAPGKKRPVEQSPQEPDSSSGIGKTGQQPAKKRLNFGQTGDSESVPDPQPLGEPPATPAAVGPTTMASGGGAPMADNNEGADGVGNAPGNWHCDSTWLGDRVITTSTRTWALPTYNNHLYKQISSASTGASNDNHYFGYSTPWGYFDFNRFHCHFSPRDWQRLINNNWGFRPKRLNFKLFNIQVKEVTTNDGVTTIANNLTSTVQVFSDSEYQLPYVLGSAHQGCLPPFPADVFMIPQYGYLTLNNGSQAVGRSSFYCLEYFPSQMLRTGNNFTFSYTFEEVPFHSSYAHSQSLDRLMNPLIDQYLYYLNRTQNQSGSAQNKDLLFSRGSPAGMSVQPKNWLPGPCYRQQRVSKTKTDNNNSNFTWTGASKYNLNGRESIINPGTAMASHKDDEDKFFPMSGVMIFGKESAGASNTALDNVMITGEEEIKATNPVATERFGTVAVNFQSSSTDPATGDVHAMGALPGMVWQDRDVYLQGPIWAKIPHTDGHFHPSPLMGGFGLKNPPPQILIKNTPVPANPPAEFSATKFASFITQYSTGQVSVEIEWELQKENSKRWNPEVQYTSNYAKSANVDFTVDNNGLYTEPRPIGTRYLTRPL

SEQ ID NO: 760 - protein, 736 aa, Artificial Sequence
  source: /note="Description of Artificial Sequence: Synthetic polypeptide"
MAADGYLPDWLEDNLSEGIREWWDLKPGAPKPKANQQKQDDGRGLVLPGYKYLGPFNRLDKGEPVNAADAAALEHDKAYDQQLKAGDNPYLRYNHADAEFQERLQEDTSFGGNLGRAVFQAKKRVLEPLGLVEEGAKTAPGRKRPVEQSPQEPDSSSGIGKTGQQPAKKRLNFGQTGDSESVPDPQPLGEPPATPAAVGPTTMASGGGAPMADNNEGADGVGNASGNWHCDSTWLGDRVITTSTRTWALPTYNNHLYKQISSASTGASNDNHYFGYSTPWGYFDFNRFHCHFSPRDWQRLINNNWGFRPKRLNFKLFNIQVKEVTTNDGVTTIANNLTSTVQVFSDSEYQLPYVLGSAHQGCLPPFPADVFMIPQYGYLTLNNGGQAVGRSSFYCLEYFPSQMLRTGNNFTFSYTFEEVPFHSSYAHSQSLDRLMNPLIDQYLYYLNRTQNQSGSAQNKDLLFSRGSPAGMSVQPKNWLPGPCYRQQRVSKTKTDNNNSNFTWTGASKYSLNGRESIINPGTAMASHKDDEDKFFPMGGVMIFGKESAGASNTALDNAMITDEEEIKATNPVATERFGTVAVNFQSSSTDPATGDVHAMGALPGMVWQDRDVYLQGPIWAKIPHTDGHFHPSPLMGGFGLKNPPPQILIKNTPVPANPPAEFSATKFASFITQYSTGQVSVEIEWELQKENSKRWNPEVQYTSNYAKSANVDFTVDNNGLYTEPRPIGTRYLTRPL

SEQ ID NO: 761 - protein, 736 aa, Artificial Sequence
  source: /note="Description of Artificial Sequence: Synthetic polypeptide"
MAADGYLPDWLEDNLSEGIREWWDLKPGAPKPKANQQKQDDGRGLVLPGYKYLGPFNGLDKGEPVNAADAAALEHDKAYDQQLKAGDNPYLRYNHADAEFQERLQEDTSFGGNLGRAVFQAKKRVLEPLGLVEEGAKTAPGKKRPVEQSPQEPDSSSGIGKTGQQPAKKRLNFGQTGDSESVPDPQPLGEPPATPAAVGPTTMASGGGAPMADNNEGADGVGNASGNWHCDSTWLGGRVITTSTRTWALPTYNNHLYKQISSASTGASNDNHYFGYSTPWGYFDFNRFHCHFSPRDWQRLINNNWGFRPKRLNFKLFNIQVKEVTTNDGVTTIANNLTSTVQVFSDSEYQLPYVLGSAHQGCLPPFPADVFMIPQYGYLTLNNGSQAVGRSSFYCLEYFPSQMLRTGNNSTFSYTFEEVPFHSSYAHSQSLDRLMNPLIDQYLYYLNRTQNQSGSAQNKDLLFSRGSPAGMSVQPKNWLPGPCYRQQRVSKTKTDNNNSNFTWTGASKYNLNGRESIINPGTAMASHKDDEDKFFPMSGVMIFGKESAGASNTALDNVMITDEEEIKATNPVATERFGTVAVNFQSSSTDPATGDVHAMGTLPGMVWQDRDVYLQGPIWAKIPHTDGHFHPSPLMGGFGLKNPPPQILIKNTPVPANPPAEFSATKFASFITQYSTGQVSVEIEWELQKENSKRWNPEVQYTSNYAKSANVDFTVDNNGLYTEPRPIGTRYLTRPL

SEQ ID NO: 762 - protein, 736 aa, Artificial Sequence
  source: /note="Description of Artificial Sequence: Synthetic polypeptide"
MAADGYLPDWLEDNLSEGIREWWDLKPGAPKPKANQQKQDDGRGLVLPGYKYLGPFNGLDKGEPVSAADAAALEHDKAYDQQLKAGDNPYLRYNHADAEFQERLQEDTSFGGNLGRAVFQAKKRVLEPLGLVEEGAKTAPGKKRPVEQSPQEPDSSSGIGKTGQQPAKERLNFGQTGDSESVPDPQPLGEPPATPAAVGPTTMASGGGAPMADNNEGADGVGNASGNWHCDSTWLGDRVITTSTRTWALPTYNNHLYKQISSASTGASNDNHYFGYSTPWGYFDFNRFHCHFSPRDWQRLINNNWGFRPKRLNFKLFNIQVKEVTTNDGVTTIANNLTSTVQVFSDSEYQLPYVLGSAHQGCLPPFPADVFMIPQYGYLTLNNGSQAVGRSSFYCLEYFPSQMLRTGNNFTFSYTFEEVPFHSSYAHSQSLDRLMNPLIDQYLYYLNRTQNQSGSAQNKDLLFSRGSPAGMSVQPKNWLPGPCYRQQRVSKTKTDNNNSNFTWTGASKYNLNGRESIINPGTAMASHKDDEDKFFPMSGVMIFGKESAGASNTALDNVMITDEEEIKATNPVATERFGTVAVNFQSSSTDPATGDVHAMGALPGMVWQDRDVYLQGPIWAKIPHTDGHFHPSPLMGGFGLKNPPPQILIKNTPVPANPPAEFSATKFASFITQYSTGQVSVEIEWELQKENSKRWNPEVQYTSNYAKSANVDFTVDNNGLYTEPRPIGTRYLTRPL

SEQ ID NO: 763 - protein, 736 aa, Artificial Sequence
  source: /note="Description of Artificial Sequence: Synthetic polypeptide"
MAADGYLPDWLEDNLSEGIREWWDLKPGAPKPKANQQKQDDGRGLVLPGYKYLGPFNGLDKGEPVNAADAAALEHDKAYDQQLKAGDNPYLRYNHADAEFQERLQEDTSFGGNLGRAVFQAKKRVLEPLGLVEEGAKTAPGKKRPVEQSPQEPDSSSGIGKTGQQPAKKRLNFGQTGDSESVPDPQPLGEPPATPAAVGPTTMASGGGAPMADNNEGADGVGNASGNWHCDSTWLGDRVITTSTRTWALPTYNNHLYKQISSASTGASNDNHYFGYSTPWGYFDFNRFHCHFSPRDWQRLINNNWGFRPKRLNFKLFNIQVKEVTTNDGVTTIANNLTSTVQVFSDSEYQLPYVLGSAHQGCLPPFPADVFMIPQYGYLTLNNGSQAVGRSSFYCLEYFPSQMLRTGNNFTFSYTFEEVPFHSSYAHSQSLDRLMNPLIDQYLYYLNRTQNQSGSAQNKDLLFSRGSPAGMSVQPKNWLPGPCYRQQRVSKTKTDNNNSNFTWTGASKYNLNGRESIINPGTAMASHKDDEDKFFPMSGVMIFGKESAGASNTALDNVMITDEGEIKATNPVATERFGTVAVNFQSSSTDPATGDVHAMGALPGMVWQDRDVYLQGPIWAKIPHTDGHFHPSPLMGGFGLKNPPPQILIKNTPVPANPPAEFSATKFASFITQYSTGQVSVEIEWELQKENSKRWNPEVQYTSNYAKSANVDFTVDNNGLYTEPRPIGTRYLTRPL

SEQ ID NO: 764 - protein, 736 aa, Artificial Sequence
  source: /note="Description of Artificial Sequence: Synthetic polypeptide"
MAADGYLPDWLEDNLSEGIREWWDLKPGAPKPKANQQKQDDGRGLVLPGYKYLGPFNGLDKGEPVNAADAAALEHDKAYDQQLKAGDNPYLRYNHADAEFQERLQEDTSFGGNLGRAVFQAKKRVLEPFGLVEEGAKTAPGKKRPVEQSPQEPDSSSGIGKTGQQPAKKRLNFGQTGDSESVPDPQPLGEPPATPAAVGPTTMASGGGAPMADNNEGADGVGNASGNWHCDSTWLGDRVITTSTRTWALPTYNNHLYKQISSASTGASNDNHYFGYSTPWGYFDFNRFHCHFSPRDWQRLINNNWGFRPKRLNFKLFNIQVKEVTTNDGVTTIANNLTSTVQVFSDSEYQLPYVLGSAHQGCLPPFPADVFMIPQYGYLTLNNGSQAVGRSSFYCPEYFPSQMLRTGNNFTFSYTFEEVPFHSSYAHSQSLDRLMNPLIDQYLYYLNRTQNQSGSAQNKDLLFSRGSPAGMSVQPKNWLPGPCYRQQRVSKTKTDNNNSNFTWTGASKYNLNGRESIINPGTAMASHKDDKDKFFPMSGVMIFGKESAGASNTALDNVMITDEEEIKATNPVATERFGTVAVNFQSSNTDPATGDVHVMGALPGMVWQDRDVYLQGPIWAKIPHTDGHFHPSPLMGGFGLKHPPPQILIKNTPVPANPPAEFSATKFASFITQYSTGQVSVEIEWELQKENSKRWNPEVQYTSNYAKSANVDFTVDNNGLYTEPRPIGTRYLTRPL

SEQ ID NO: 765 - protein, 736 aa, Artificial Sequence
  source: /note="Description of Artificial Sequence: Synthetic polypeptide"
MAADGYLPDWLEDNLSEGIREWWDLKPGAPKPKANQQKQDDGRGLVLPGYKYLGPFNGLDKGEPVNAADAAALEHDKAYDQQLKAGDNPYLRYNHADAEFQERLQEDTSFGGNLGRAVFQAKKRVLEPFGLVEEGAKTAPGKKRPVEQSPQEPDSSSGIGKTGQQPAKKRLNFGQTGDSESVPDPQPLGEPPATPAAVGPTTMASGGGAPMADNNEGADGVGNASGNWHCDSTWLGDRVITTSTRTWALPTYNNHLYKQISSASTGASNDNHYFGYSTPWGYFDFNRFHCHFSPRDWQRLINNNWGFRPKRLNFKLFNIQVKEVTTNDGVTTIANNLTSTVQVFSDSEYQLPYVLGSAHQGCLPPFPADVFMIPQYGYLTLNNGSQAVGRSSFYCLEYFPSQMLRTGNNFTFSYTFEEVPFHSSYAHSQSLDRLMNPLIDQYLYYLNRTQNQSGSAQNKDLLFSRGSPAGMSVQPKNWLPGPCYRQQRVSKTKTDNNNSNFTWTGASKYNLNGRESIINPGTAMASHKDDKDKFFPMSGVMIFGKESAGASNTALDNVMITDEEEIKATNPVATERFGTVAVNFQSSDTDPATGDVHVMGALPGMVWQDRDVYLQGPIWAKIPHTDGHFHPSPLMGGFGLKHPPPQILIKNTPVPANPPAEFSATKFASFITQYSTGQVSVEIEWELQKENSKRWNPEVQYTSNYAKSANVDFTVDNNGLYTEPRPIGTRYLTRPL

SEQ ID NO: 766 - protein, 736 aa, Artificial Sequence
  source: /note="Description of Artificial Sequence: Synthetic polypeptide"
MAADGYLPDWLEDNLSEGIREWWDLKPGAPKPKANQQKQGDGRGLVLPGYKYLGPFNGLDKGEPVNAADAAALEHDKAYDQQLKAGDNPYLRYNHADAEFQERLQEDTSFGGNLGRAVFQAKKRVLEPFGLVEEGAKTAPGKKRPVEQSPQEPDSSSGIGKTGQQPAKKRLNFGQTGDSESVPDPQPLGEPPATPAAVGPTTMASGGGAPMADNNEGADGVGNASGNWHCDSTWLGDRVITTNTRTWALPTYNNHLYKQISSASTGASNDNHYFGYSTPWGYFDFNRFHCHFSPRDWQRLINNNWGFRPKRLNFKLFNIQVKEVTTNDGVTTIANNLTSTVQVFSDSEYQLPYVLGSAHQGCLPPFPADVFMIPQYGYLTLNNGSQAVGRSSFYCLEYFPSQMLRTGNNFTFSYTFEEVPFHSSYGHSQSLDRLMNLLIDQYLYYLNRTQNQSGSAQNKDLLFSRGSPAGMFVQPKNWLPGPCYRQQRVSKTKTDNNNSNFTWTGASKYNLNGRESIINPGTAMASHKDDEDKFFPMSGVMIFGKESAGASNTALDNVMITDEEEIKATNPVATERFGTVAVNFQSSSTDPATGDVHVMGALPGMVWQDRDVYLQGPIWAKIPHTDGHFHPSPLMGGFGLKHPPPQILIKNTPVPANPPAEFSATKFASFITQYSTGQVSVEIEWELQKENSKRWNPEVQYTSNYAKSANVDFTVDNNGLYTEPRPIGTRYLTRPL

SEQ ID NO: 767 - protein, 736 aa, Artificial Sequence
  source: /note="Description of Artificial Sequence: Synthetic polypeptide"
MAADGYLPDWLEDNLSEGIREWWDLKPGAPKPKANQQKQDDGRGLVLPGYKYLGPFNGLDKGEPVNAADAAALEHDKAYDQQLKAGDNPYLRYNHADAEFQERLQEDTSFGGNLGRAVFQAKKRVLEPFGLVEEGAKTAPGKKRPVEQSPQEPDSSSGIGKTGQQPAKKRLNFGQTGDSESVPDPQPLGEPPATPAAVGPTTMASGGGAPMADNNEGADGVGNASGNWHCDSTWLGDRVITTNTRTWALPTYNNHLYKQISSASTGASNDNHYFGYSTPWGYFDFNRFHCHFSPRDWQRLINNNWGFRPKRLNFKLFNIQVKEVTTNDGVTTIANNLTSTVQVFSDSEYQLPYVLGSAHQGCLPPFPADVFMIPQYGYLMLNNGSQAVGRSSFYCLEYFPSQMLRTGNNFTFSYTFEEVPFHSSYAHSQSLDRLMNPLIDQYLYYLNRTQNQSGSAQNKDLLFSRGSPAGMSVQPKNWLPGPCYRQQRVSKTKTDNNNSNFTWTGASKYNLNGRESIINPGTAMASHKDDEDKFFPMSGVMIFGKESAGASNTALDNVMITDEEEIKATNPAATERFGTVAVNFQSSSTDPATGDVHVMGALPGMVWQDRDVYLQGPIWAKIPHTDGHFHPSPLMGGFGLKHPPPQILIKNTPVPANPPAEFSATKFASFITQYSTGQVSVEIEWELQKENSKRWNPEVQYTSNYAKSANVDFTVDNNGLYTEPRPIGTRYLTRPL

SEQ ID NO: 768 - protein, 736 aa, Artificial Sequence
  source: /note="Description of Artificial Sequence: Synthetic polypeptide"
MAADGYLPDWLEDNLSEGIREWWDLKPGAPKPKANQQKQDDGRGLVLPGYKYLGPFNGLDKGEPVNAADAAALEHDKAYDQQLKAGDNPYLRYNHADAEFQERLQEDTSFGGNLGRAVFQAKKRVLEPFGLVEEGAKTAPGKKRPVEQSPQEPDSSSGIGKTGQQPAKKRLNFGQTGDSESVPDPQPLGEPPATPAAVGPTTMASGGGAPMADNNEGADGVGNASGNWHCDSTWLGDRVITTSTRTWALPTYNNHLYKQISSASTGASNDNHYFGYSTPWGYFDFNRFHCHFSPRDWQRLINNNWGFRPKRLNFKLFNIQVKEVTTNDGVTTIANNLTSTVQVFSDSEYQLPYVLGSAHQGCLPPFPADVFMIPQYGYLTLNNGSQAVGRSSFYCLEYFPSQMLRTGNNFTFSYTFEEVPFHSSYAHSQSLDRLMNPLIDQYLYYLNRTQNQSGSAQNKDLLFSRGSPAGMSVQPKNWLPGPCYRQQRVSKTKTDNNNSNFTWTGASKYNLNGRESIINPGTAMASHKDDEDKFFPMSGVMIFGKESAGASNTALDNVMITDEEEIKATNPVATERFGTVAVNFQSSSTDPATGDVHVMGALPGMVWQDRDVYLQGPIWAKIPHTDGHFHPSPLMGGFGLKHPPPQILIKNTPVPANPPAEFSATKFASFITQYSTGQVSVEIEWELQKENSKRWNPEVQYTSNYAKSANVDFTVDNNGLYTEPRPIGTRYLTRPL

SEQ ID NO: 769 - protein, 736 aa, Artificial Sequence
  source: /note="Description of Artificial Sequence: Synthetic polypeptide"
  MOD_RES (102)..(102): Any amino acid
MAADGYLPDWLEDNLSEGIREWWDLKPGAPKPKANQQKQDDGRGLVLPGYKYLGPFNGLDKGEPVNAADAAALEHDKAYDQQLKAGDNPYLRYNHADAEFQXRLQEDTSFGGNLGRAVFQAKKRVLEPFGLVEEGAKTAPGKKRPVEQSPQEPDSSSGIGKTGQQPAKKRLNFGQTGDSESVPDPQPLGEPPATPAAVGPTTMASGGGAPMADNNEGADGVGNASGNWHCDSTWLGGRVITTSTRTWALPTYNNHLYKQISSASTGASNDNHYFGHSTPWGYFDFNRFHCHFSPRDWQRLINNNWGFRPKRLNFKLFNIQVKEVTTNDGVTTIANNLTSTVQVFSDSEYQLPYVLGSAHQGCLPPSPADVFMIPQYGYLTLNNGSQAVGRSSFYCLEYFPSQMLRTGNNFTFSYTFEEVPFHSSYAHSQSLDRLMNPLIDQYLYYLNRTQNQSGSAQNKDLLFSRGSPAGMSVQPKNWLPGPCYRQQRVSKTKTDNNNSNFTWTGASKYNLNGRESIINPGTAMASHKDDKDKFFPMSGVMIFGKESAGASNTALDNVMITDEEEIKATNPVATERFGTVAVNFQSSNTDPATGDVHVMGALPGMVWQDRDVYLQGPIWAKIPHTDGHFHPSPLMGGFGLKHPPPQILIKNTPVPANPPAEFSATKFASFITQYSTGQVSVEIEWELQKENSKRWNPEVQYTSNYAKSANVDFTVDNNGLYTEPRPIGTRYLTRPL

SEQ ID NO: 770 - protein, 736 aa, Artificial Sequence
  source: /note="Description of Artificial Sequence: Synthetic polypeptide"
MAADGYFPDWLEDNLSEGIREWWDLKPGAPKPKANQQKQDDGRGLVLPGYKYLGPFNGLDKGEPVNAADAAALEHDKAYDQQLKAGDNPYLRYNHADAEFQERLQEDTSFGGNLGRAVFQAKKRVLEPFGLVEEGAKTAPGKKRPVEQSPQEPDSSSGIGRTGQQPAKKRLNFGQTGDSESVPDPQPLGEPPATPAAVGPTTMASGGGAPMADNNEGADGVGNASGNWHCDSTWLGDRVITTSTRTWALPTYNNHLYKQISSASTGASNDNHYFGYSTPWGYFDFNRFHCHFSPRDWQRLINNNWGFRPKRLNFKLFNIQVKEVTTNDGVTTIANNLTSTVQVFSDSEYQLPYVLGSAHQGCLPPFPADVFMIPQYGYLTLNNGSQAVGRSSFYCLEYFPSQMLRTGNNFTFSYTFEEVPFHSSYAHSQSLDRLMNPLIDQYLYYLNRTQNQSGSAQNKDLLFSRGSPAGMSVQPKNWLPGPCYRQQRVSKTKTDNNNSNFTWTGASKYNLNGRESIINPGTAMASHKDDEDKFFPMSGVMIFGKESAGASNTALDNVMITDEEEIKATNPVATERFGTVAVNFQSSSPDPATGDVHVMGALPGMVWQDRDVYLQGPIWAKIPHTDGHFHPSPLMGGFGLKHPPPQILIKNTPVPANPPAEFSATKFASFITQYSTGQVSVEIEWELQKENSKRWNPEVQYTSNYAKSANVDFTVDNNGLYSEPRPIGTRYLTRPL

SEQ ID NO: 771 - protein, 736 aa, Artificial Sequence
  source: /note="Description of Artificial Sequence: Synthetic polypeptide"
MAADGYLPDWLEDNLSEGIREWWDLKPGAPKPKANQQKQDDGRGLVLPGYKYLGPFNGLDKGEPVNAADAAALEHDKAYDQQLKAGDNPYLRYNHADAEFQERLQEDTSFGGNLGRAVFQAKKRVLEPFGLVEEGAKTAPGKKRPVEQSPQEPDSSSGIGKTGQQPAKKRLNFGQTGDSESVPDPQPLGEPPATPAAVGPTTMASGGGAPMADNNEGADGVGNASGNWHCDSTWLGDRVITTSTRTWALPTYNNHLYKQTSSASTGASNDNHYFGYSTPWGYFDFNRFHCHFSPRDWQRLINNNWGFRPKRLNFKLFNIQVKEVTTNDGVTTIANNLTSTVQVFSDSEYQLPYVLGSAHQGCLPPFPADVFMIPQYGYLTLNNGSQAVGRSSFYCLEYFPSQMLRTGNNFTFSYTFEEVPFHSSYAHSQSLDRLMNPLIDQYLYYLNRTQNQSGSAQNKDLLFSRGSPAGMSVQPKNWLPGPCYRQQRVSKTKTDYNNSNFTWTGASKYNLNGRESIINPGTAMASHKDDEDKFFPMSGVMIFGKESAGASNTALDNVMITDEEEIKATNPVATERFGTVAVNFQSSSTDPATGDVHVMGALPGMVWQDRDVYLQGPIWAKIPHTDGHFHPSPLMGGFGLKHPPPQILIKNTPVPANPPAEFSATKFASFITQYSTGQVSVEIEWELQKENSKRWNPEVQYTSNYAKSANVDFTVDNNGLYTEPRPIGTRYLTRPL

SEQ ID NO: 772 - protein, 736 aa, Artificial Sequence
  source: /note="Description of Artificial Sequence: Synthetic polypeptide"
MAADGYPPDWLEDNLSEGIREWWDLKPGVPKPKANQQKQDDGRGLVLPGYKYLGPFNGLDKGEPVNAADAAALEHDKAYDQQLKAGDNPYLRYNHADAEFQERLQEDTSFGGNLGRAVFQAKKRVLEPFGLVEEGAKTAPGKKRPVEQSPQEPDSSSGIGKTGQQPAKKRLNFGQTGDSESVPDPQPLGEPPATPAAVGPTTMASGGGAPMADNNEGADGVGNASGNWHCDSTWLGDRVITTSTRTWALPTYNNHLYKQISSASTGASNDNHYFGYSTPWGYFDFNRFHCHFSPRDWQRLINNNWGFRPKRLNFKLFNIQVKEVTTNDGVTTIANNLTSTVQVFSDSEYQLPYVLGSAHQGCLPPFPADVFMIPQYGYLTLNNGSQAVGRSSFYCLEYFPSQMLRTGNNFTFSYTFEEVPFHSSYAHSQSLDRLMNPLIDQYLYYLNRTQNQSGSAQNKDLLFSRGSPAGMSVQPKNWLPGPCYRQQRVSKTKTDNNNSNFTWTGASKYNLNGRESIINPGTAMASHKDDEDKFFPMSGVMIFGKESAGASNTALDNVMITDEEEIKATNPVATERFGTVAVNFQSSSTDPATGDVHVMGALPGMVWQDRDVYLQGPIWAKIPHTDGHFHPSPLMGGFGLKHPPPQILIKNTPVPANPPAEFSATKFASFITQYSTGQVSVEIEWELQKENSKRWNPEVQYTSNYAKSANVDFTVDNNGLYTEPRPIGTRYLTRPL

SEQ ID NO: 773 - protein, 732 aa, Artificial Sequence
  source: /note="Description of Artificial Sequence: Synthetic polypeptide"
MAADGYLPDWLEDNLSEGIREWWDLKPGAPKPKANQQKQDDGRGLVLPGYKYLGPFNGLDKGEPVNAADAAALEHDKAYDQQLKAGDNPYLRYNHADAEFQERLQEDTSFGGNLGRAVFQAKKRVLEPFGLVEEGAKTAPGKKRPVEQSPQEPDSSSGIGKTGQQPAKKRLNFGQTGDSESVPDPQPLGEPPATPAAVGPTTMASGGGAPMADNNEGADGVGNASGNWHCDSTWLGDRVITTSTRTWALPTYNNHLYKQISSASTGASNDNHYFGYSTPWGYFDFNRFHCHFSPRDWQRLINNNWGFRPKRLNFKLFNIQVKEVTTNDGVTTIANNLTSTVQAFSDSEYQLPYVLGSAHQGCLPPFPADVFMIPQYGYLTLNNGSQAVGRSSFYCLEYFPSQMLRTGNNFTFSYTFEEVPFHSSYAHSQSLDRLMNPLIDPYLYYLNRTQNQSGSAQNKDLLFSRGSPAGMSVQPKNWLPGPCYRQQRVSKTKTDNNNSNFTWTGASKYNLNGRESIINPGTAMASHKDDEDKFFPMSGVMIFGKESAGASNTALDNVMITDEEEIKATNPVATERFGTVAVNFQSSSTDPATGDVHVMGALPGMVWQDRDVYLQGPIWAKIPHTDGHFHPSPLMGGFGLKHPPPQILIKNTPVPANPPAEFSATKFASFITQYSTGQVSVEIEWELQKENSKRWNPEVQYTSNYAKSANVDFTVDNNGLYTEPRPIGTRYL

SEQ ID NO: 774 - protein, 736 aa, Artificial Sequence
  source: /note="Description of Artificial Sequence: Synthetic polypeptide"
MAADGYLPDWLEDNLSEGIREWWDLKPGAPKPKANQQKQDDGRGLVLPGYKYLGPFNGLDKGEPVNAADAAALEHDKAYDQQLKAGDNPYLRYNHADAEFQERLQEDTSFGGNLGRAVFQAKKRVLEPFGLVEEGAKTAPGKKRPVEQSPQEPDSSSGIGKTGQQPAKKRLNFGQTGDSESVPDPQPLGEPPATPAAVGPTTMASGGGAPMADNNEGADGVGNASGNWHCDSTWLGDRVITTSTRTWALPTYNNHLYKQISSASTGASNDNHYFGYSTPWGYFDFNRFHCHFSPRDWQRLINNNWGFRPKRLNFKLFNIQVKEVTTNDGVTTIANNLTSTVQVFSDSEYQLPYVLGSAHQGCLPPFPADVFMIPQYGYLTLNNGSQAVGRSSFYCLEYFPSQMLRTGNNFTFSYTFEEVPFHSSYAHSQSLDRLMNPLIDQYLYYLNRTQNQSGSAQNKDLLFSRGSPAGMSVQPKNWLPGPCYRQQRVSKTKTDNNNSNFTWTGASKYNLNGRESIINPGTAMASHKDDEDKFFPMSGVMIFGKESAGASNTALDNVMITDEEEIKATNPVATERFGTVAVNFQSSSTDPATGDVHVMGALPGMVWQDRDVYLQGPIWAKIPHTDGHSHPSPLMGGFGLKHPPPQILIKNTPVPANPPAEFSATKFASFITQYSTGQVSVEIEWELQKENSKRWNPEVQYTSNYAKSANVDFTVDNNGLYTEPRPIGTRYLTRPL

SEQ ID NO: 775 - protein, 736 aa, Artificial Sequence
  source: /note="Description of Artificial Sequence: Synthetic polypeptide"
MAADGYLPDWLEDNLSEGIREWWDLKPGAPKPKANQQKQDDGRGLVLPGYKYLGPFNGLDKGEPVNAADAAALEHDKAYDQQLKAGDNPYLRYNHADAEFQERLQEDTSFGGNLGRAVFQAKKRVLEPFGLVEEGAKTAPGKKRPVEQSPQEPDSSSGIGKTGQQPAKKRLNFGQTGDSESVPDPQPLGEPPATPAAVGPTTMASGGGAPMADNNEGADGVGNASGNWHCDSTWLGDRVITTSTRTWALPTYNNHLYKQISSASTGASNDNHYFGYSTPWGYFDFNRFHCHFSPRDWQRLINNNWGFRPKRLNFKLFNIQVKEVTTNDGVTTIANNLTSTVQVFSDSEYQLPYVLGSAHQGCLPPFPADVFMIPQYGYLTLNNGSQAVGRSSFYCLEYFPSQMLRTGNNFTFSYTFEEVPFHSSYAHSQSLDRLMNPLIDLYLYYLNRTQNQSGSAQNKDLLFSRGSPAGMSVQPKNWLPGPCYRQQRVSKTKTDNNNSNFTWTGASKYNLNGRESIINPGTAMASHKDDEDKFFPMSGVMIFGKESAGTSNTALDNVMITDEEEIKATNPVATERFGTVAVNFQSSSTDPATGDVHVMGALPGMVWQDRDVYLQGPIWAKIPHTDGHFHPSPLMGGFGLKHPPPQILIKNTPVPANPPAEFSATKFASFITQYSTGQVSVEIEWELQKENSKRWNPEVQYTSNYAKSANVDFTVDNNGLYTEPRPIGTRYLTRPL

SEQ ID NO: 776 - protein, 736 aa, Artificial Sequence
  source: /note="Description of Artificial Sequence: Synthetic polypeptide"
MAADGYLPDWLEDSLSEGIREWWDLKPGAPKPKANQQKQDDGRGLVLPGYKYLGPFNGLDKGEPVNAADAAALEHDKAYDQQLKAGDNPYLRYNHADAEFQERLQEDTSFGGNLGRAVFQAKKRVLEPFGLVEEGAKTAPGKKRPVEQSPQEPDSSSGIGKTGQQPAKKRLNFGQTGDSESVPDPQPLGEPPATPAAVGPTTMASGGGAPMADNNEGADGVGNASGNWHCDSTWLGDRVITTSTRTWALPTYNNHLYKQISSASTGASNDNHYFGYSTPWGYFDFNRFHCHFSPRDWQRLINNNWGFRPKRLNFKLFNIQVKEVTTNDGVTTIANNLTSTVQVFSDSEYQLPYVLGSAHQGCLPPFPADVFMIPQYGYLTPNNGSQAVGRSSFYCLEYFPSQMLRTGNNFTFSYTFEEVPFHSSYAHSQSLDRLMNPLIDQYQYYLNRTQNQSGSAQNKDLLFSRGSPAGMSVQPKNWLPGPCYRQQRVSKTKTDNNNSNFTWTGASKYNLNGRESIINPGTAMASHKDDEDKFFPMSGVMIFGKESAGASNTALDNVMITDEEEIKATNPVATERFGTVAVNFQSSSTDPATGDVHVMGALPGMVWQDRDVYLQGPIWAKIPHTDGHFHPSPLMGGFGLKHPPPQILIKNTPVPANPPAEFSATKFASFITQYSTGQVSVEIEWELQKENSKRWNPEVQYTSNYAKSANVDFTVDNNGLYTEPRPIGTRYLTRPL

SEQ ID NO: 777 - protein, 736 aa, Artificial Sequence; identical to SEQ ID NO: 768
  source: /note="Description of Artificial Sequence: Synthetic polypeptide"

SEQ ID NO: 778 - protein, 735 aa, Artificial Sequence
  source: /note="Description of Artificial Sequence: Synthetic polypeptide"
MAADGYLPDWLEDTLSEGIRQWWKLKPGPPPPKPAERHKDDSRGLVLPGYKYLGPFNGLDKGEPVNEADAAALEHDKAYDRQLDSGDNPYLKYNHADAEFQERLKEDTSFGGNLGRAVFQAKKRVLEPLGLVEEPVKTAPGKKRPVEHSPVEPDSSSGTGKAGQQPARKRLNFGQTGDADSVPDPQPLGQPPAAPSGLGTNTMATGSGAPMADNNEGADGVGNSSGNWHCDSTWMGDRVITTSTRTWALPTYNNHLYKQISSQSGASNDNHYFGYSTPWGYFDFNRFHCHFSPRDWQRLINNNWGFRPKRLNFKLFNIQVKEVTQNDGTTTIANNLTSTVQVFTDSEYQLPYVLGSAHQGCLPPFPADVFMVPQYGYLTLNNGSQAVGRSSFYCLEYFPSQMLRTGNNFTFSYTFEDVPFHSSYAHSQSLDRLMNPLIDQYLYYLSRTNTPSGTTTQSRLQFSRAGASDIRDQSRNWLPGPCYRQQRVSKTSADNNNSEYSWTGATKYHLNGRDSLVNPGPAMASHKDDEEKFFPQSGVLIFGKQGSEKTNVDIEKVMITDEEEIRTTNPVATEQYGSVSTNLQRGNRQAATADVNTQGVLPGMVWQDRDVYLQGPIWAKIPHTDGHFHPSPLMGGFGLKHPPPQILIKNTPVPANPSTTFSAAKFASFITQYSTGQVSVEIEWELQKENSKRWNPEIQYTSNYNKSVNVDFTVDTNGVYSEPRPIGTRYLTRNL

SEQ ID NO: 779 - DNA, 2211 bp, Artificial Sequence
  source: /note="Description of Artificial Sequence: Synthetic polynucleotide"
atggctgctgacggttatcttccagattggctcgaggacaacctttctgaaggcattcgtgagtggtgggctctgaaacctggagtccctcaacccaaagcgaaccaacaacaccaggacaaccgtcggggtcttgtgcttccgggttacaaatacctcggacccggtaacggactcgacaaaggagagccggtcaacgaggcggacgcggcagccctcgaacacgacaaagcttacgaccagcagctcaaggccggtgacaacccgtacctcaagtacaaccacgccgacgccgagtttcaggagcgtcttcaagaagatacgtcttttgggggcaaccttggcagagcagtcttccaggccaaaaagaggatccttgagcctcttggtctggttgaggaagcagctaaaacggctcctggaaagaagaggcctgtagatcagtctcctcaggaaccggactcatcatctggtgttggcaaatcgggcaaacagcctgccagaaaaagactaaatttcggtcagactggcgactcagagtcagtcccagaccctcaacctctcggagaaccaccagcagcccccacaagtttgggatctaatacaatggcttcaggcggtggcgcaccaatggcagacaataacgagggtgccgatggagtgggtaattcctcaggaaattggcattgcgattcccaatggctgggcgacagagtcatcaccaccagcaccagaacctgggccctgcccacttacaacaaccatctctacaagcaaatctccagccaatcaggagcttcaaacgacaaccactactttggctacagcaccccttgggggtattttgactttaacagattccactgccacttctcaccacgtgactggcagcgactcattaacaacaactggggattccggcccaagaaactcagcttcaagctcttcaacatccaagttaaagaggtcacgcagaacgatggcacgacgactattgccaataaccttaccagcacggttcaagtgtttacggactcggagtatcagctcccgtacgtgctcgggtcggcgcaccaaggctgcctcccgccgtttccagcggacgtcttcatggtccctcagtatggatacctcaccctgaacaacggaagtcaagcggtgggacgctcatccttttactgcccggagtacttcccttcgcagatgctaaggactggaaataacttccaattcagctataccttcgaggatgtaccttttcacagcagctacgctcacagccagagtttggatcgcttgatgaatcctcttattgatcagtatctgtactacctgaacagaacgcaaggaacaacctctggaacaaccaaccaatcacggctgctttttagccaggctgggcctcagtctatgtctttgcaggccagaaattggctacctgggccctgctaccggcaacagagactttcaaagactgctaacgacaacaacaacagtaactttccttggacagcggccagcaaatatcatctcaatggccgcgactcgctggtgaatccaggaccagctatggccagtcacaaggacgatgaagaaaaatttttccctatgcacggcaatctaatatttggcaaagaagggacaacggcaagtaacgcagaattagataatgtaatgattacggatgaagaagagattcgtaccaccaatcctgtggcaacagagcagtatggaactgtggcaaataacttgcagagctcaaatacagctcccacgactagaactgtcaatgatcagggggccttacctggcatggtgtggcaagatcgtgacgtgtaccttcaaggacctatctgggcaaagattcctcacacggatggacactttcatccttctcctctgatgggaggctttggactgaaacatccgcctcctcaaatcatgatcaaaaatactccggtaccggcaaatcctccgacgactttcagcccggccaagtttgcttcatttatcactcagtactccactggacaggtcagcgtggaaattgagtgggagctacagaaagaaaacagcaaacgttggaatccagagattcagtacacttccaactacaacaagtctgttaatgtggactttactgtagacactaatggtgtttatagtgaacctcaccctattggaacccggtatctcacacgaaacttgtaa

SEQ ID NO: 780 - DNA, 2211 bp, Artificial Sequence
  source: /note="Description of Artificial Sequence: Synthetic polynucleotide"
atggctgctgatggttatcttccagattggctcgaggacaacctttctgaaggcattcgtgagtggtgggctctgaaacctggagtccctcaacccaaagcgaaccaacaacaccaggacaaccgtcggggtcttgtgcttccgggttacaaatacctcggacccggtaacggactcgacaaaggagagccggtcaacgaggcggacgcggcagccctcgaacacgacaaagcttacgaccagcagctcaaggccggtgacaacccgtacctcaagtacaaccacgccgacgccgagtttcaggagcgtcttcaagaagatacgtcttttgggggcaaccttggcagagcagtcttccaggccaaaaagaggatccttgagcctcttggtctggttgaggaagcagctaaaacggctcctggaaagaagaggcctgtagatcagtctcctcaggaaccggactcatcatctggtgttggcaaatcgggcaaacagcctgccagaaaaagactaaatttcggtcagactggcgactcagagtcagtcccagaccctcaacctctcggagaaccaccagcagcccccacaagtttgggatctaatacaatggcttcaggcggtggcgcaccaatggcagacaataacgagggtgccgatggagtgggtaattcctcaggaaattggcattgcgattcccaatggctgggcgacagagtcatcaccaccagcaccagaacctgggccctgcccacttacaacaaccatctctacaagcaaatctccagccaatcaggagcttcaaacgacaaccactactttggctacagcaccccttgggggtattttgactttaacagattccactgccacttctcaccacgtgactggcagcgactcattaacaacaactggggattccggcccaagaaactcagcttcaagctcttcaacatccaagttaaagaggtcacgcagaacgatggcacgacgactgttgccaataaccttaccagcacggttcaagtgtttacggactcggagtatcaactcccgtacgtgctcgggtcggcgcaccaaggctgtctcccgccgtttccagcggacgtcttcatggtccctcagtatggatacctcaccctgaacaacggaagtcaagcggtgggacgctcatccttttactgcctggagtacttcccttcgcagatgctaaggactggaaataacttccaattcagctataccttcgaggatgtaccttttcacagcagctacgctcacagccagagtttggatcgcttgatgaatcctcttattgatcagtatctgtactacctgaacagaacgcaaggaacaacctctggaacaaccaaccaatcacggctgctttttagccaggctgggcctcagtctatgtctttgcaggccagaaattggctacctgggccctgctaccggcaacagagactttcaaagactgctaacgacaacaacaacagtaactttccttggacagcggccagcaaatatcatctcaatggccgcgactcgctggtgaatccaggaccagctatggccagtcacaaggacgatgaagaaaaatttttccctatgcacggcaatctaatatttggcaaagaagggacaacggcaagtaacgcagaattagataatgtaatgattacggatgaagaagagattcgtaccaccaatcctgtggcaacagagcagtatggaactgtggcaaataacttgcagagctcaaatacagctcccacgactagaactgtcaatgatcagggggccttacctggcatggtgtggcaagatcgtgacgtgtaccttcaaggacctatctgggcaaagattcctcacacggatggacactttcatccttctcctctgatgggaggctttggactgaaacatccgcctcctcaaatcatgatcaaaaatactccggtaccggcaaatcctccgacgactttcagcccggccaagtttgcttcatttatcactcagtactccactggacaggtcagcgtggaaattgagtgggagctacagaaagaaaacagcaaacgttggaatccagagattcagtacacttccaactacaacaagtctgttaatgtggactttactgtagacactaatggtgtttatagtgaacctcgccctattggaacccggtatctcacacgaaacttgtaa

SEQ ID NO: 781 - DNA, 2211 bp, Artificial Sequence
  source: /note="Description of Artificial Sequence: Synthetic polynucleotide"
atggctgctgacggttatcttccagattggctcgaggacaacctttctgaaggcattcgtgagtggtgggctctgaaacctggagtccctcaacccaaagcgaaccaacaacaccaggacaaccgtcggggtcttgtgcttccgggttacaaatacctcggacccggtaacggactcgacaaaggagagccggtcaacgaggcggacgcggcagccctcgaacacgacaaagcttacgaccagcagctcaaggccggtgacaacccgtacctcaagtacaaccacgccgacgccgagtttcaggagcgtcttcaagaagatacgtcttttgggggcaaccttggcagagcagtcttccaggccaaaaagaggatccttgagcctcttggtctggttgaggaagcagctaaaacggctcctggaaagaagaggcctgtagatcagtctcctcaggaaccggactcatcatctggtgttggcaaatcgggcaaacagcctgccagaaaaagactaaatttcggtcagactggcgactcagagtcagtcccagaccctcaacctctcggagaaccaccagcagcccccacaagtttgggatctaatacaatggcttcaggcggtggcgcaccaatggcagacaataacgagggtgccgatggagtgggtaattcctcaggaaattggcattgcgattcccaatggctgggcgacagagtcatcaccaccagcaccagaacctgggccctgcccacttacaacaaccatctctacaagcaaatctccggccaatcaggagcttcaaacgacaaccactactttggctacagcaccccttgggggtattttgactttaacagattccactgccacttctcaccacgtgactggcagcgactcattaacaacaactggggattccggcccaagaaactcagcttcaagctcttcaacatccaagttaaagaggtcacgcagaacgatggcacgacgactattgccaataaccttaccagcacggttcaagtgtttacggactcggagtatcagctcccgtacgtgctcgggtcggcgcaccaaggctgtctcccgccgtttccagcggacgtcttcatggtccctcagtatggatacctcaccctgaacaacggaagtcaagcggtgggacgctcatccttttactgcctggagtacttcccttcgcagatgctaaggactggaaataacttccaattcagctataccttcgaggatgtaccttttcacagcagctacgctcacagccagagtttggatcgcttgatgaatcctcttattgatcagtatctgtactacctgaacagaacgcaaggaacaacctctggaacaaccaaccaatcacggctgctttttagccaggctgggcctcagtctatgtctttgcaggccagaaattggctacctgggccctgctaccggcaacagagactttcaaagactgctaacggcaacaacaacagtaactttccttggacagcggccagcaaatatcatctcaatggccgcgactcgctggtgaatccaggaccagctatggccagtcacaaggacgatgaagaaaaatttttccctatgcacggcaatctaatatttggcaaagaagggacaacggcaagtaacgcagaattagataatgtaatgattacggatgaagaagagattcgtaccaccaatcctgtggcaacagagcagtgtggaactgtggcaaataacttgcagagctcaaatacagctcccacgactagaactgtcaatgatcagggggccttacctggcatggtgtggcaagatcgtgacgtgtaccttcaaggacctatctgggcaaagattcctcacacggatggacactttcatccttctcctctgatgggaggctttggactgaaacatccgcctcctcaaatcatgatcaaaaatactccggtaccggcaaatcctccgacgactttcagcccggccaagtttgcttcatttatcactcagtactccactggacaggtcagcgtggaaattgagtgggagctacagaaagaaaacagcaaacgttggaatccagagattcagtacacttccaactacaacaagtctgttaatgtggactttactgtagacactaatggtgtttatagtgaacctcgccctattggaacccggtatctcacacgaaacttgtaa

SEQ ID NO: 782 - DNA, 2212 bp, Artificial Sequence
  source: /note="Description of Artificial Sequence: Synthetic polynucleotide"
  modified_base (1283)..(1283): a, c, t, or g
atggctgctgacggttatcttccagattggctcgaggacaacctttctgaaggcattcgtgagtggtgggctctgaaacctggagtccctcaacccaaagcgaaccaacaacaccaggacaaccgtcggggtcttgtgcttccgggttacaaatacctcggaccgggtaacggactcgacaaaggagagccggtcaacgaggcggacgcggcagccctcgaacacgacaaagcttacgaccagcagctcaaggccggtgacaacccgtacctcaagtacaaccacgccgacgccgagtttcaggagcgtcttcaagaagatacgtcttttgggggcaaccttggcagagcagtcttccaggccaaaaagaggatccttgagcctcttggtctggttgagggagcagctaaaacggctcctggaaagaagaggcctgtagatcagtctcctcaggaaccggactcatcatctggtgttggcaaatcgggcaaacagcctgccagaaaaagactaaatttcggtcagactggcgactcagagtcagtcccagaccctcaacctctcggagaaccaccagcagcccccacaagtttgggatctaatacaatggcttcaggcggtggcgcaccaatggcagacaataacgagggtgccgatggagtgggtaattcctcaggaaattggcattgcgattcccaatggctgggcgacagagtcatcaccaccagcaccagaacctgggccctgcccacttacaacagccatctctacaagcaaatctccagccaatcaggagcttcaaacgacaaccactactttggctacagcaccccttgggggtattttgactttaacagattccactgccacttctcaccacgtgactggcagcgactcattaacaacaactggggattccggcccaagaaactcagcttcaagctcttcaacatccaagttaaagaggtcacgcagaacgatggcacgacgactattgccaataaccttaccagcacggtccaagtgtttacggactcggagtatcagctcccgtacgtgctcgggtcggcgcaccaaggctgtctcccgccgtttccagcggacgccttcatggtccctcagtatggatacctcaccctgaacaacggaagtcaagcggtgggacgctcatccttttactgcctggagtacttcccttcgcagatgctaaggactggaaataacttccaattcagctataccttcgaggatgtaccttttcacggcagctacgctcacagccngagtttggatcgcttgatgaatcctcttattgatcagtatctgtactacctgaacagaacgcaaggaacaacctctggaacaaccaaccaatcacggctgctttttagccaggctgggcctcagtctatgtctttgcaggccagaaattggctacctgggccctgctaccggcaacagagacttttcaaagactgctaacgacaacaacaacagtaactttccttggacagcggccagcaaatatcatctcaatggccgcgactcgctggtgaatccaggaccagctatggccagtcacaaggacgatgaagaaaaatttttccctatgcacggcaatctaatatttggcaaagaagggacaacggcaagtaacgcagaattagataatgtaatgattacggatgaagaagagattcgtaccaccaatcctgtggcaacagagcagtatggaactgtggcaaataacttgcagagctcaaatacagctcccacgactagaactgtcaatgatcagggggccttacctggcatggtgtggcaagatcgtgacgtgtaccttcaaggacctatctgggcaaagattcctcacacggatggacactttcatccttctcctctgatgggaggctttggactgaaacatccgcctcctcaaatcatgatcaaaaatactccggtaccggcaaatcctccgacgactttcagcccggccaagtttgcttcatttatcactcagtactccactggacaggtcagcgtggaaattgagtgggagctacagaaagaaaacagcaaacgttggaatccagagattcagtacacttccaactacaacaagtctgttaatgtggactttactgtagacactaatggtgtttatagtgaacctcgccctattggaacccggtatctcacacgaaactcgtaa

SEQ ID NO: 783 - DNA, 2212 bp, Artificial Sequence
  source: /note="Description of Artificial Sequence: Synthetic polynucleotide"
atggctgctgacggttatcttccagattggctcgaggacaacctttctgaaggcattcgtgagtggtgggctctgaaacctggagtccctcaacccaaagcgaaccaacaacaccaggacaaccgtcggggtcttgtgcttccgggttacaaatacctcggacccggtaacggactcgacaaaggagagccggtcaacgaggcggacgcggcagccctcgaacacgacaaagcttacgaccagcagctcaaggccggtgacaacccgtacctcaagtacaaccacgccgacgccgagtttcaggagcgtcttcaagaagatacgtcttttgggggcaaccttggcagagcagtcttccaggccaaaaagaggatccttgagcctcttggtctggttgagggagcagctaaaacggctcctggaaagaagaggcctgtagatcagtctcctcaggaaccggactcatcatctggtgttggcaaatcgggcaaacagcttgccagaaaaagactaaatttcggtcagactggcgactcagagtcagtcccagaccctcaacctctcggagaaccaccagcagcccccacaagtttgggatctaatacaatggcttcaggcggtggcgcaccaatggcagacaataacgagggtgccgatggagtgggtaattcctcaggaaattggcattgcgattcccaatggctgggcgacagagtcatcaccaccagcaccagaacctgggccctgcccacttacaacagccatctctacaagcaaatctccggccaatcaggagcttcaaacgacaaccactactttggctacagcaccccctgggggtattttgactttaacagattccactgccacttctcaccacgtgactggcagcgactcattaacaacaactggggattccggcccaagaaactcagcttcaagctcttcaacatccaagttaaagaggtcacgcagaacgatggcacgacgactattgccaataaccttaccagcacggttcaagtgtttacggactcggagtatcagctcccgtacgtgctcgggtcggcgcaccaaggctgtctcccgccgtttccagcggacgtcttcatggtccctcagtatggatacctcaccctgaacaacggaagtcaagcggtgggacgctcatccttttactgcctggagtacttcccttcgcagatgctaaggactggaaataacttccaattcagctataccttcgaggatgtaccttttcacagcagctacgctcacagccagagtttggatcgcttgatgaatcctcttattgatcagtatctgtactacctgaacagaacgcaaggaacaacctctggaacaaccaaccaatcacggctgctttttagccaggctgggcctcagtctatgtctttgcaggccagaaattggctacctgggccctgctaccggcaacagagactttcaaagactgctaacgacaacaacaacagtaactttccttggacagcggccagcaaatatcatctcaatggccgcgactcgctggtgaatcccaggaccagctatggccagtcacaaggacgatgaagaaaaatttttccctatgcacggcaatctaatatttggcaaagaagggacaacggcaagtaacgcagaattagataatgtaatgattacggatgaagaagagattcgtaccaccaatcctgtggcaacagagcagtatggaactgtggcaaataacttgcagagctcaaatacagctcccacgactagaactgtcaatgatcagggggccttacctggcatggtgtggcaagatcgtgacgtgtaccttcaaggacctatctgggcaaagattcctcacacggatggacactttcatccttctcctctgatgggaggctttggactgaaacatccgcctcctcaaatcatgatcaaaaatactccggtaccggcaaatcctccgacgactttcagcccggccaagtttgcttcatttatcactcagtactccactggacaggtcagcgtggaaattgagtgggagctacagaaagaaaacagcaaacgttggaatccagagattcagtacacttccaactacaacaagtctgttaatgtggactttactgtagacactaatggtgtttatagtgaacctcgccctattggaacccggtatctcacacgaaacttgtaa

SEQ ID NO: 784 - DNA, 2212 bp, Artificial Sequence
  source: /note="Description of Artificial Sequence: Synthetic polynucleotide"
atggctgctgacggttatcttccagattggctcgaggacaacctttctgaaggcattcgtgagtggtgggctctgaaacctggagtccctcaacccaaagcgaaccaacaacaccaggacgaccgtcggggtcttgtgcttccgggttacaaatacctcggacccggtaacggactcgacaaaggagagccggtcaacgaggcggacgcggcagccctcgaacacgacaaagcttacgaccagcagctcaaggccggtgacaacccgtgcctcaagtacaaccacgccgacgccgagtttcaggagcgtcttcaagaagatacgtcttttgggggcaaccttggcagagcagtcttccaggccaaaaagaggatccttgagcctcttggtctggttgaggaagcagctaaaacggctcctggaaagaagaggcctgtagatcagtctcctcaggaaccggactcatcatctggtgttggcaaatcgggcaaacagcctgccagaaaaagactaaatttcggtcagactggcgactcagagtcagtcccagaccctcaacctctcggagaaccaccagcagcccccacaagtttgggatctaatacaatggcttcaggcggtagcgcaccaatggcagacaataacgagggtgccgatggagtgggtaattcctcaggaaattggcattgcgattcccaatggctgggcgacagagtcatcaccaccagcaccagaacctgggccctgcccacttacaacaaccatctctacaagcaaatctccagccaatcaggagcttcaaacgacaaccactactttggctacagcaccccttgggggtattttgactttaacagattccactgccacttctcaccacgtgactggcagcgactcattaacaacaactggggattccggcccaagaaactcagcttcaagctcttcaacatccaagttaaagaggtcacgcagaacgatggcacgacgactattgccaataaccttaccagcacggttcaagtgtttacggactcggagtatcagctcccgtacgtgctcgggtcggcgcaccaaggctgtctcccgccgtttccagcggacgtcttcatggtccctcagtatggatacctcaccctgaacaacggaagtcaagcggtgggacgctcatccttttactgcctggagtacttcccttcgcagatgctaaggactggaaataacttccaattcagctataccttcgaggatgtaccttttcacagcagctacgctcacagccagagtttggatcgcttgatggatcctcttattgatcagtatctgtactacctgaacagaacgcaaggaacaacctctggaacaaccaaccaatcacggctgctttttagccaggctgggcctcagtctatgtctttgcaggccagaaattggctacctgggccctgctaccggcaacagagactttcaaagactgctaacgacaacaacaacagtaactttccttggacagcggccagcaaatatcatctcaatggccgcgactcgctggtgaatccaggaccagctatggccagtcacaaaggacgatgaagaaaaatttttccctatgcacggcaatctaatatttggcaaagaagggacaacggcaagtaacgcagaattagataatgtaatgattacggatgaagaagagattcgtaccaccaatcctgtggcaacagagcagtatggaactgtggcaaataacttgcagagctcaaatacagctcccacgactagaactgtcaatgatcagggggccttacctggcatggtgtggcaagatcgtgacgtgtaccttcaaggacctatctgggcaaagattcctcacacggatggacactttcatccttctcctctgatgggaggctttggactgaaacatccgcctcctcaaatcatgatcaaaaatactccggtaccggcaaatcctccgacgactttcagcccggccaagtttgcttcatttatcactcagtactccactggacaggtcagcgtggaaattgagtgggagctacagaaagaaaacagcaaacgttggaatccagagattcagtacacttccaactacaacaagtctgttaatgtggactttactgtagacactaatggtgtttatagtgaacctcgccctattggaacccggtatctcacacgaaacctgtaa

SEQ ID NO: 785 - DNA, 2211 bp, Artificial Sequence
  source: /note="Description of Artificial Sequence: Synthetic polynucleotide"
atggctgctgacggttatcttccagattggctcgaggacaacctttctgaaggcattcgtgagtggtgggctctgaaacctggagtccctcaacccaaagcgaaccaacaacaccaggacgaccgtcggggtcttgtgcttccgggttacaaatacctcggacccggtaacggactcgacaaaggagagccggtcaacgaggcggacgcggcagccctcgaacacgacaaagcttacgaccagcagctcaaggccggtgacaacccgtacctcaagtacaaccacgccgacgccgagtttcaggagcgtcttcaagaagatacgtcttttgggggcaaccttggcagagcagtcttccaggccaaaaagaggatccttgagcctcttggtctggttgaggaagcagctaaaacggctcctggaaagaagaggcctgtagatcagtctcctcaggaaccggactcatcatctggtgttggcaaatcgggcaaacagcctgccagaaaaagactaaatttcggtcagactggcgactcagagtcagtcccagaccctcaacctctcggagaaccaccagcagcccccacaagtttgggatctaatacaatggcttcaggcggtggcgcaccaatggcagacaataacgagggtgccgatggagtgggtaattcctcaggaaattggcattgcgattcccaatggctgggcaacagagtcatcaccaccagcaccagaacctgggccctgcccacttacaacaaccatctctacaagcaaatctccagccaatcaggagcttcaaacgacaaccactactttggctacagcaccccttgggggtattttgactttaacagattccactgccacttctcaccacgtgactggcagcgactcattaacaacaactggggattccggcccaagaaactcagcttcaagctcttcaacatccaagttaaagaggtcacgcagaacgatggcacgacgactattgccaataaccttaccagcacggttcaagtgtttacggactcggagtatcagctcccgtacgtgctcgggtcggcgcaccaaggctgtctcccgccgtttccagcggacgtcttcatggtccctcagtatggatacctcaccctgaacaacggaagtcaagcggtgggacgctcatccttttactgcctggagtacttcccttcgcagatgctaaggactggaaataacttccaattcagctataccttcgaggatgtaccttttcacagcagctacgctcacagccagagtttggatcgcttgatgaatcctcttattgatcagtatctgtactacctgaacagaacgcaaggaacaacctctggaacaaccaaccaatcacggctgctttttagccaggctgggcctcagtctatgtctttgcaggccagaaattggctacctgggccctgctaccggcaacagagactttcaaagactgctaacgacaacaacaacagtaactttccttggacagcggccagcaaatatcatctcaatggccgcgactcgctggtgaatccaggaccagctatggccagtcacaaggacgatgaagaaaaatttttccctatgcacggcaatctaatatttggcaaagaagggacaacggcaagtaacgcagaattagataatgtaatgattacggatgaagaagagattcgtaccaccaatcctgtggcaacagagcagtatggaactgtggcaaataacttgcagagctcaaatacagctcccacgactagaactgtcaatgatcagggggccttacctggcatggtgtggcaagatcgtgacgtgtaccttcaaggacctatctgggcaaagattcctcacacggatggacactttcatccttctcctctgatgggaggctttggactgaaacatccgcctcctcaaatcatgatcaaaaatactccggtaccggcaaatcctccgacgactttcagcccggccaagtttgcttcatttatcactcagtactccactggacaggtcagcgtggaaattgagtgggagctacagaaagaaaacagcaaacgttggaatccagagattcagtacacttccaactacaacaagtctgttaatgtggactttactgtagacactaatggtgtttatagtgaacctcgccctattggaacccggtatctcacacgaaacttgtaa

SEQ ID NO: 786 - DNA, 2211 bp, Artificial Sequence
  source: /note="Description of Artificial Sequence: Synthetic polynucleotide"
atggctgctgacggttatcttccagattggctcgaggacaacctttctgaaggcattcgtgagtggtgggctctgaaacctggagtccctcaacccaaagcgaaccaacaacaccaggacgaccgtcggggtcttgtgcttccgggttacaaatacctcggacccggtaacggactcgacaaaggagagccggtcaacgaggcggacgcggcagccctcgaacacgacaaagcttacgaccagcagctcaaggccggtgacaacccgtacctcaagtacaaccacgccgacgccgagtttcaggagcgtcttcaagaagatacgtcttttgggggcaaccttggcagagcagtcttccaggccaaaaagaggatccttgagcctcttggtctggttgaggaagcagctaaaacggctcctggaaagaagaggcctgtagatcagtctcctcaggaaccggactcatcatctggtgttggcaaatcgggcaaacagcctgccagaaaaagactaaatttcggtcagactggcgactcagagtcagtcccagaccctcaacctctcggagaaccaccagcagcccccacaagtttgggatctaatacaatggcttcaggcggtggcgcaccaatggcggacaataacgagggtgccgatggagtgggtaattcctcaggaaattggcattgcgattcccaatggctgggcgacagagtcatcaccaccagcaccagaacctgggccctgcccacttacaacaaccatctctacaagcaaatctccagccaatcaggagcttcaaacgacaaccactactttggctacagcaccccttgggggtattttgactttaacagattccactgccacttctcaccacgtgactggcagcgactcattaacaacaactggggattccggcccaagaaactcagcttcaagctcttcaacatccaagttaaagaggtcacgcagaacgatggcacgacgactattgccaataaccttaccagcacggttcaagtgtttacggactcggagtatcagctcccgtacgtgctcgggtcggcgcaccaaggctgtctcccgccgtttccagcggacgtcttcatggtccctcagtatggatacctcaccctgaacaacggaagtcaagcggtgggacgctcatccttttactgcctggagtacttcccttcgcagatgctaaggactggaaataacttccaattcagctataccttcgaggatgtaccttttcacagcagctacgctcacagccagagtttggatcgcttgatgaatcctcttattgatcagtatctgtactacctgaacagaacgcaaggaacaacctctggaacaaccaaccaatcacggctgctttttagccaggctgggcctcagtctatgtctttgcaggccagaaattggctacctgggccctgctaccggcaacagagactttcaaagactgctaacgacaacaacaacagtaactttccttggacagcggccagcaaatatcatctcaatggccgcgactcgctggtgaatccaggaccagctatggccagtcacaaggacgatgaagaaaaatttttccctatgcacggcaatctaatatttggcaaagaagggacaacggcaagtaacgcagaattagataatgtaatgattacggatgaagaagagattcgtaccaccaatcctgtggcaacagtgcagtatggaactgtggcaaataacttgcagagctcaaatacagctcccacgactagaactgtcaatgatcagggggccttacctggcatggtgtggcaagatcgtgacgtgtaccttcaaggacctatctgggcaaagattcctcacacggatggacactttcatccttctcctctgatgggaggctttggactgaaacatccgcctcctcaaatcatgatcaaaaatactccggtaccggcaaatcctccgacgactttcagcccggccaagtttgcttcatttatcactcagtactccactggacaggtcagcgtggaaattgagtgggagctacagaaagaaaacagcaaacgttggaatccagagattcagtacacttccaactacaacaagtctgttaatgtggactttactgtagacactaatggtgtttatagtgaacctcgccctattggaacccggtatctcacacgaaacttgtaa

SEQ ID NO: 787 - DNA, 2211 bp, Artificial Sequence
  source: /note="Description of Artificial Sequence: Synthetic polynucleotide"
atggctgctgacggttatcttccagattggctcgaggacaacctttctgaaggcattcgtgagtggtgggctctgaaacctggagtccctcaacccaaagcgaaccaacaacaccaggacaaccgtcggggtcttgtgcttccgggttacaaatacctcggacccggtaacggactcgacaaaggagagccggtcaacgaggcggacgcggcagccctcgaacacgacaaagcttacgaccagcagctcaaggccggtgacaacccgtacctcaagtacaaccacgccgacgccgagtttcaggagcgtcttcaagaagatacgtcttttgggggcaaccttggcagagcagtcttccaggccaaaaaggggatccttgagcctcttggtctggttgaggaagcagctaaaacggctcctggaaagaagaggcctgtagatcagtctcctcaggaaccggactcatcatctggtgttggcaaatcgggcaaacagcctgccagaaaaagactaaatttcggtcagactggcgactcagagtcagtcccagaccctcaacctctcggagaaccaccagcagcccccacaagtttgggatctaatacaatggcttcaggcggtggcgcaccaatggcagacaataacgagggtgccgatggagtgggtaattcctcaggaaattggcattgcgattcccaatggctgggcgacagagtcatcaccaccagcaccagaacctgggccctgcccacttacaacaaccatctctacaagcaaatctccagccaatcaggagcttcaaacgacaaccactactttggctacagcaccccttgggggtattttgactttaacagattccactgccacttctcaccacgtgactggcagcgactcattaacaacaactggggattccggcccaagaaactcagcttcaagctcttcaacatccaagttaaagaggtcacgcagaacgatggcacgacgactattgccaataaccttaccagcacggttcaagtgtttacggactcggagtatcagctcccgtacgtgttcgggtcggcgcaccaaggctgtctcccgccgtttccagcggacgtcttcatggtccctcagtatggatacctcaccctgaacaacggaagtcaagcggtgggacgctcatccttttactgcctggagtacttcccttcgcagatgctaaggactggaaataacttccaattcagctataccttcgaggatgtaccttttcacagcagctacgctcacagccagagttcggatcgcttgatgaatcctcttattgatcagtatctgtactacctgaacagaacgcaaggaacaacctctggaacaaccaaccaatcacggctgctttttagccaggctgggcctcagtctatgtctttgcaggccagaaattggctacctgggccctgctaccggcaacagagactttcaaagactgctaacgacaacaacaacagtaactttccttgaacagcggccagcaaatatcatctcaatggccgcgactcgctggtgaatccaggaccagctatggccagtcacaaggacgatgaagaaaaatttttccctatgcacggcaatctaatatttggcaaagaagggacaacggcaagtaacgcagaattagataatgtaatgattacggatgaagaagagattcgtaccaccaatcctgtggcaacagagcagtatggaactgtggcaaataacttgcagagctcaaatacagctcccacgactagaactgtcaatgatcagggggccttacctggcatggtgtggcaagatcgtgacgtgtaccttcaaggacctatctgggcaaagattcctcacacggatggacactttcatccttctcctctgatgggaggctttggactgaaacatccgcctcctcaaatcatgatcaaaaatactccggtaccggcaaatcctccgacgactttcagcccggccaagtttgcttcatttatcactcagtactccactggacaggtcagcgtggaaattgagtgggagctacagaaagaaaacagcaaacgttggaatccagagattcagtacacttccaactacaacaagtctgttaatgtggactttactgtagacactaatggtgtttatagtgaacctcgccctattggaacccggtatctcacacgaaacttgtaa

SEQ ID NO: 788 - DNA, 2211 bp, Artificial Sequence
  source: /note="Description of Artificial Sequence: Synthetic polynucleotide"
atggctgctgacggttatcttccagattggctcgaggacaacctttctgaaggcattcgtgagtggtgggctctgaaacctggagtccctcaacccaaagcgaaccaacaacaccaggacaaccgtcggggtcttgtgcttccgggttacaaatacctcggacccggtaacggactcgacgaaggagagccggtcaacgaggcggacgcggcagccctcgaacacgacaaagcttacgaccagcagctcaaggccggtgacaacccgtacctcaagtacaaccacgccgacgccgagtttcaggagcgtcttcaagaagatacgtcttttgggggcaaccttggcagagcagtcttccaggccaaaaagaggatccttgagcctcttggtctggttgagggagcagctaaaacggctcctggaaagaagaggcctgtagatcagtctcctcaggaaccggactcatcatctggtgttggcaaatcgggcaaacagcctgccagaaaaagactaaatttcggtcagactggcgactcagagtcagtcccagaccctcaacctctcggagaaccaccagcagcccccacaagtttgggatctaatacaatggcttcaggcggtggcgcaccaatggcagacaataacgagggtgccgatggagtgggtaattcctcaggaaattggcattgcgattcccaatggctgggcgacagagtcatcaccaccagcaccagaacctgggccctgcccacttacaacagccacctctacaagcaaatctccagccaatcaggagcttcaaacgacaaccactactttggctacagcaccccttgggggtattttgactttaacagattccactgccacttctcaccacgtgactggcagcgactcattaacaacaactggggattccggcccaagaaactcagcttcaagctcttcaacatccaagttaaagaggtcacgcagaacgatggcacgacgactattgccaataaccttaccagcacggttcaagtgtttacggactcggagtatcagctcccgtacgtgctcgggtcggcgcaccaaggctgtctcccgccgtttccagcggacgtcttcatggtccctcagtatggatacctcaccctgaacaacggaagtcaagcggtgggacgctcatccttttactgcctggagtacttcccttcgcagatgctaaggactggaaataacttccaattcagctataccttcgaggatgtaccttttcacagcagctacgctcacagccagagtttggatcgcttgatgaatcctcttattgatcagtatctgtactacctgaacagaacgcaaggaacaacctctggaacaaccaaccaatcacggctgctttttagccaggctgggcctcagtctatgtctttgcaggccagaaattggctacctgggccctgctaccggcaacagagactttcaaagactgctaacgacaacaacaacagtaactttccttggacagcggccagcaaatatcatctcaatggccgcgactcgctggtgaatccaggaccagctatggccagtcacaaggacgatgaagaaaaatttttccctatgcacggcaatctaatatttggcaaagaagggacaacggcaagtaacgcagaattagataatgtaatgattacggatgaagaagagattcgtaccaccaatcctgtggcaacagagcagtatggaactgtggcaaataacttgcagagctcaaatacagctcccacgactagaactgtcaatgatcagggggccttacctggcatggtgtggcaagatcgtgacgtgtaccttcaaggacctatctgggcaaagattcctcacacggatggacactttcatccttctcctctgatgggaggctttggactgaaacatccgcctcctcaaatcatgatcaaaaatactccggtaccggcaaatcctccgacgactttcagcccggccaagtttgcttcatttatcactcagtactccactggacaggtcagcgtggaaattgagtgggagctacagaaagaaaacagcaaacgttggaatccagagattcagtacacttccaactacaacaagtctgttaatgtggactttactgtagacactaatggtgtttatagtgaacctcgccctattggaacccggtatctcacacgaaacttgtaa

SEQ ID NO: 789 - DNA, 2211 bp, Artificial Sequence
  source: /note="Description of Artificial Sequence: Synthetic polynucleotide"
atggctgctgacggttatcttccagattggctcgaggacaacctttctgaaggcattcgtgagtggtgggctctgaaacctggagtccctcaacccaaagcgaaccaacaacaccaggacaaccgtcggggtcttgtgcttccgggttacaaatacctcggacccggtaacggactcgacaaaggagagccggtcaacgaggcggacgcggcagccctcgaacacgacaaagcttacgaccagcagctcaaggccggtgacaacccgtacctcaagtacaaccacgccgacgccgagtttcaggagcgtcttcaagaagatacgtcttttgggggcaaccttggcagagcagtcttccaggccaaaaagaggatccttgagcctcttggtctggttgagggagcagctaaaacggctcctggaaagaagaggcctgtagatcagtctcctcaggaaccggactcatcatctggtgttggcaaatcgggcaaacagcctgccagaaaaagactaaatttcggtcagactggcgactcagagtcagtcccagaccctcaacctctcggagaaccaccagcagcccccacaagtttgggatctaatacaatggcttcaggcggtggcgcaccaatggcagacaataacgagggtgccgatggagtgggtaattcctcaggaaattggcattgcgattcccaatggctgggcgacagagtcatcaccaccagcaccagaacctgggccctgcccacttacaacagccatctctacaagcaaatctccagccaatcaggagcttcaaacgacaaccactactttggctacagcaccccttggggtattttgactttaacagattccactgccacttctcaccacgtgactggcagcgactcattaacaacaactggggattccggcccaagaaactcagcttcaagctcttcaacatccaagttaaagaggtcacgcagaacgatggcacgacgactattgccaataaccttaccagcacggttcaagtgtttacggactcggagtatcagctcccgtacgtgctcgggtcggcgcaccaaggctgtctcccgccgtttccagcggacgccttcatggtccctcagtatggatacctcaccctgaacaacggaagtcaagcggtgggacgctcatccttttactgcctggagtacttcccttcgcagatgctaaggactggaaataacttccaattcagctataccctcgaggatgtaccttttcacagcagctacgctcacagccagagtttggatcgcttgatgaatcctcttattgatcagtatctgtactacctgaacagaacgcaaggaacaacctctggaacaaccaaccaatcacggctgctttttagccaggctgggcctcagtctatgtctttgcaggccagaaattggctacctgggccctgctaccggcaacagagactttcaaagactgctaacgacaacaacaacagtaactttccttggacagcggccagcaaatatcatctcaatggccgcgactcgctggtgaatccaggaccagctatggccagtcacaaaggacgatgaagaaaaatttttccctatgcacggcaatctaatatttggcaaagaagggacaacggcaagtaacgcagaattagatagtgtaatgattacggatgaagaagagattcgtaccaccaatcctgtggcaacagagcagtatggaactgtggcaaataacttgcagagctcaaatacagctcccacgactagaactgtcaatgatcagggggccttacctggcatggtgtggcaagatcgtgacgtgtaccttcaaggacctatctgggcaaagattcctcacacggatggacactttcatccttctcctctgatgggaggctttggactgaaacatccgcctcctcaaatcatgatcaaaaatactccggtaccggcaaatcctccgacgactttcagcccggccaagtttgcttcatttatcactcagtactccactggacaggtcagcgtggaaattgagtgggagctacagaaagaaaacagcaaacgttggaatccagagattcagtacacttccaactacaacaagtctgttaatgtggactttactgtagacactaatggtgtttatagtgaacctcgccctattggaacccggtatctcacacgaaacttgtaa

SEQ ID NO: 790 - DNA, 2205 bp, Artificial Sequence
  source: /note="Description of Artificial Sequence: Synthetic polynucleotide"
atgactgacggttaccttccagattggctagaggacaacctctctgagggcgttcgagagtggtgggcgctgcaacctggagcccctaaacccaaggcaaatcaacaacatcaggacaacgctcggggtcttgtgcttccgggttacaaatacctcggacccggcaacggactcgacaagggggaacccgtcaacgcagcggacgcggcagccctcgagcacgacaaggcctacgaccagcagctcaaggccggtgacaacccctacctcaagtacaaccacgccgacgcggagttccagcagcggcttcagggcgacacatcgtttgggggcaacctcggcagagcagtcttccaggccaaaaagagggttcttgaacctcttggtctggttgagcaagcgggtgagacggctcctggaaagaagagaccgttgattgaatccccccagcagcccgactcctccacgggtatcggcaaaaaaggcaagcagccggctaaaaagaagctcgttttcgaagacgaaactggagcaggcgacggaccccctgagggatcaacttccggagccatgtctgatgacagtgagatgcgtgcagcaactggcggagctgcagtcgagggcggacaaggtgccgatggagtgggtaatgcctcgggtgattggcattgcgattccacctggtctgagggccacgtcacgaccaccagcaccagaacctgggtcttgcccacctacaacaaccacctctacaagcgactcggagagagcctgcagtccaacacctacaacggattctccaccccctggggatactttgacttcaaccgcttccactgccacttctcaccacgtgactggcagcgactcatcaacaacaactggggcatgcgacccaaagccatgcgggtcaaaatcttcaacatccaggtcaaggaggtcacgacgtcgaacggcgagacaacggtggctaataaccttaccagcacggttcagatctttgcggactcgtcgtacgaactgccgtacgtgatggatgcgggtcaagagggcagcctgcctccttttcccaacgacgtctttatggtgccccagtacggctactgtggactggtgaccggcaacacttcgcagcaacagactgacagaaatgccttctactgcctggagtactttccttcgcagatgctgcggactggcaacaactttgaaattacgtacagttttgagaaggtgcctttccactcgatgtacgcgcacagccagagcctggaccggctgatgaaccctctcatcgaccagtacctgtggggactgcaatcgaccaccaccggaaccaccctgaatgccgggactgccaccaccaactttaccaagctgcggcctaccaacctttccaactttaaaaagaactggctgcccgggccttcaatcaagcagcagggcttctcaaagactgccaatcaaaactacaagatccctgccaccgggtcagacagtctcatcaaatacgagacgcacagcactctggacggaagatggagtgccctgacccccggacctccaatggccacggctggacctgcggacagcaagttcagcaacagccagctcatctttgcggggcctaaacagaacggcaacacggccaccgtacccgggactctgatcttcacctctgaggaggagctggcagccaccaacgctaccgatacggacatgtggggcaacctacctggcggtgaccagagcaacagcaacctgccgaccgtggacagactgacagccttgggagccgtgcctggaatggtctggcaaaacagagacatttactaccagggtcccatttgggccaagattcctcataccgatggacactttcacccctcaccgctgattggtgggtttgggctgaaacacccgcctcctcaaatttttatcaagaacaccccggtacctgcgaatcctgcgacgaccttcagctctactccggtaaactccttcattactcagtacagcactggccaggtgtcggtgcagattgactgggagatccagaaggagcggtccaaacgctggaaccccgaggtccagtttacctccaactacggacagcaaaactctctgttgtgggctcccgatgcggctgggaaatacactgagcctagggctatcggtacccgctacctcacccaccacctgtaa

SEQ ID NO: 791 - DNA, 2205 bp, Artificial Sequence
  source: /note="Description of Artificial Sequence: Synthetic polynucleotide"
atgactgacggttaccttccagattggctagaggacaacctctctgaaggcgttcgagagtggtgggcgctgcaacctggagcccctaaacccaaggcaaatcaacaacatcaggacaacgctcggggtcttgtgcttccgggttacaaatacctcggacccggcaacggactcgacaagggggaacccgtcaacgcagcggacgcggcagccctcgagcacgacaaggcctacgaccagcagctcaaggccggtgacaacccctacctcaagtacaaccacgccgacgcggagttccagcagcggcttcagggcgacacatcgtttgggggcaacctcggcagagcagtcttccaggccaaaaagagggttcttgaacctcttggtctggttgagcaagcgggtgagacggctcctggaaagaagagaccgttgattgaatccccccagcagcccgactcctccacgggtatcggcaaaaaaggcaagcagccggctaaaaagaagctcgttttcgaagacgaaactggagcaggcgacggaccccctgagggatcaacttccggagccatgtctgatgacagtgagatgcgtgcagcagctggcggagctgcagtcgagggcggacaaggtgccgatggagtgggtaatgcctcgggtgattggcattgcgattccacctggtctgagggccacgtcacgaccaccagcaccagaacctgggtcttgcccacctacaacaaccacctctacaagcgactcggagagagcctgcagtccaacacctacaacggattctccaccccctggggatactttgacttcaaccgcttccactgccacttcttaccacgtgactggcagcgactcatcaacaacaactggggcgtgcgacccaaagccatgcgggtcaaaatcttcaacatccaggtcaaggaggtcacgacgtcgaacggcgagacaacggtggctaataaccttaccagcacggttcagatctttgcggactcgtcgtacgaactgccgtacgtgatggatgcgggtcaagagggcagcctgcctccttttcccaacgacgtctttatggtgccccagtacggctactgtggactggtgaccggcgacacttcgcagcaacagactgacagaaatgccttctactgcctggagtactttccttcgcagatgctgcggactggcaacaactttgaaattacgtacagttttgagaaggtgcctttccactcgatgtacgcgcacagccagagcctggaccggctgatgaaccctctcatcgaccagtacctgtggggactgcaatcgaccaccaccggaaccaccctgaatgccgggactgccaccaccaactttaccaagctgcggcctaccaacttttccaactttaaaaagaactggctgcccgggccttcaatcaagcagcagggcttctcaaagactgccaatcaaaactacaagatccctgccaccgggtcagacagtctcatcaaatacgagacgcacagcactctggacggaagatggagtgccctgacccccggacctccaatggccacggctggacctgcggacagcaagttcagcaacagccagctcatctttgcggggcctaaacagaacggcaacacggccaccgtacccgggactctgatcttcacctctgaggaggagctggcagccaccaacgccaccgatacggacatgtggggcaacctacctggcggtgaccagagcaacagcaacctgccgaccgtggacagactgacagccttgggagccgtgcctggaatggtctggcaaaacagagacatttactaccagggtcccatttgggccaagattcctcataccgatggacactttcacccctcaccgctgattggtgggtttgggctgaaacacccgcctcctcaaatttttatcaagaacaccccggtacctgcgaatcctgcgacgaccttcagctctactccggtaaactccttcattactcagtacagcactggccaggtgtcggtgcagattgactgggagatccagaaggagcggtccaaacgctggaaccccgaggtccagtttacctccaactacggacagcaaaactctctgttgtgggctcccgatgcggctgggaaatacactgagcctagggctatcggtacccgctacctcacccaccacctgtaa

SEQ ID NO: 792 - DNA, 2205 bp, Artificial Sequence
  source: /note="Description of Artificial Sequence: Synthetic polynucleotide"
atgactgacggttaccttccagattggctagaggacaacctctctgaaggcgttcgagagtggtgggcgctgcaacctggagcccctaaacccaaggcaaatcaacaacatcaggacaacgctcggggtcttgtgcttccgggttacaaatacctcggacccggcaacggactcgacgagggggaacccgtcaacgcagcggacgcggcagccctcgagcacgacaaggcctacgaccagcagctcaaggccggtgacaacccctacctcaagtacaaccacgccgacgcggagttccagcagcggcttcagggcgacacatcgtttgggggcaacctcggcagagcagtcttccaggccaaaaagagggttcttgaacctcttggtctggttgagcaagcgggtgagacggctcctggaaagaagagaccgttgattgaatccccccagcagcccgactcctccacgggtatcggcaaaaaaggcaagcagccggctaaaaagaagctcgttttcgaagacgaaactggagcaggcgacggaccccctgagggatcaacttccggagccatgtctgatgacagtgagatgcgtgcagcagctggcggagctgcagtcgagggcggacaaggtgccgatggagtgggtaatgcctcgggtgattggcattgcgattccacctggtctgagggccacgtcacgaccaccagcaccagaacctgggtcttgcccacctacaacaaccacctctacaagcgactcggagagagcctgcagtccaacacctacaacggattctccaccccctggggatactttgacttcaaccgcttccactgccacttctcaccacgtgactggcagcgactcatcaacaacaactggggcatgcgacccaaagccatgcgggtcaaaatcttcaacatccaggtcaaggaggtcacgacgtcgaacggcgagacaacggtggctaataaccttaccagcacggttcagatctttgcggactcgtcgtacgaactgccgtacgtgatggatgcgggtcaagagggcagcctgcctccttttcccaacgacgtctttatggtgccccagtacggctactgtggactggtgaccggcaacacttcgcagcaacagactgacagaaatgccttctactgcctggagtactttccttcgcagatgctgcggactggcaacaactttgaaattacgtacagttttgagaaggtgcctttccactcgatgtacgcgcacagccagagcctggaccggctgatgaaccctctcatcgaccagtacctgtggggactgcaatcgaccaccaccggaaccaccctgaatgccgggactgccaccaccaactttaccaagctgcggcctaccaacttttccaactttaaaaagaactggctgcccgggccttcaatcaagcagcagggcttctcaaagactgccaatcaaaactacaagatccctgccaccgggtcagacagtctcatcaaatacgagacgcacagcactctggacggaagatggagtgccctgacccccggacctccaatggccacggctggacctgcggacagcaagttcagcaacagccagctcatctttgcggggcctaaacagaacggcaacacggccaccgtacccgggactctgatcttcacctctgaggaggagctggcagccaccaacgctaccgatacggacatgtggggcaacctacctggcggtgaccagagcaacagcaacctgccgaccgtggacagactgacagccttgggagccgtgcctggaatggtctggcaaaacagagacatttactaccagggtcccatttgggccaagattcctcataccgatggacactttcacccctcaccgctgattggtgggtttgggctgaaacacccgcctcctcaaatttttatcaagaacaccccggtacctgcgaatcctgcgacgaccttcagctctactccggtaaactccttcattactcagtacagcactggccaggtgtcggtgcagattgactgggagatccagaaggagcggtccaaacgctggaaccccgaggtccagtttacctccaactacggacagcaaaactctctgttgtgggctcccgatgcggctgggaaatacactgagcctagggctatcggtacccgctacctcacccaccacctgtaa

SEQ ID NO: 793 - DNA, 2205 bp, Artificial Sequence
  source: /note="Description of Artificial Sequence: Synthetic polynucleotide"
atgactgacggttaccttccagattggctagaggacaacctctctgaaggcgttcgagagtggtgggcgctgcaacctggagcccctaaacccaaggcaaatcaacaacatcaggacaacgctcggggtcttgtgcttccgggttacaaatacctcggacccggcaacggactcgacaagggggaacccgtcaacgcagcggacgcggcagccctcgagcacgacaaggcctacgaccagcagctcaaggccggtgacaacccctacctcaagtacaaccacgccgacgcggagttccagcagcggcttcagggcgacacatcgtttgggggcaacctcggcagagcagtcttccaggccaaaaagagggttcttgaacctcttggtctggttgagcaagcgggtgagacggctcctggaaagaagagaccgttgattgaatccccccagcagcccgactcctccacgggtatcggcaaaaaaggcaagcagccggctaaaaagaagctcgttttcgaagacggaactggagcaggcgacggaccccctgagggatcaacttccggagccatgtctgatgacagtgagatgcgtgcagcagctggcggagctgcagtcgagggcggacaaggtgccgatggagtgggtaatgcctcgggtgattggcattgcgattccacctggtctgagggccacgtcacgaccaccagcaccagaacctgggtcttgcccacctacaacaaccacctctacaagcgactcggagagagcctgcagtccaacacctacaacggattccccaccccctggggatactttgacttcaaccgcttccactgccacttctcaccacgtgactggcagcgactcatcaacaacaactggggcatgcgacccaaagccatgcgggtcaaaatcttcaacatccaggtcaaggaggtcacgacgtcgaacggcgagacaacggcggctaataaccttaccagcacggttcagatctttgcggactcgtcgtacgaactgccgtacgtgatggatgcgggtcaagagggcagcctgcctccttttcccaacgacgtctttatggtgccccagtacggctactgtggactggtgaccggcaacacttcgcagcaacagactgacagaaatgccttctactgcctggagtactttccttcgcagatgctgcggactggcaacaactttgaaattacgtacagttttgagaaggtgcctttccactcgatgtacgcgcacagccagagcctggaccggctgatgaaccctctcatcgaccagtacctgtggggactgcaatcgaccaccaccggaaccaccctgaatgccgggactgccaccaccaactttaccaagctgcggcctaccaacttttccaactttaaaaagaactggctgcccgggccttcaatcaagcagcagggcttctcaaagactgccaatcaaaactacaagatccctgccaccgggtcagacagtctcatcaaatacgagacgcacagcactctggacggaagatggagtgccctgacccccggacctccaatggccacggctggacctgcggacagcaagttcagcaacagccagctcatctttgcggggcctaaacagaacggcaacacggccaccgtacccgggactctgatcttcacctctgaggaggagctggcagccaccaacgccaccgatacggacatgtggggcaacctacctggcggtgaccagagcaacagcaacctgccgaccgtggacagactgacagccttgggagccgtgcctggaatggtctggcaaaacagagacatttactaccagggtcccatttgggccaagattcctcataccgatggacactttcacccctcaccgctgattggtgggtttgggctgaaacacccgcctcctcaaatttttatcaagaacaccccggtacctgcgaatcctgcgacgaccttcagctctactccggtaaactccttcattactcagtacagcactggccaggtgtcggtgcagattgactgggagatccagaaggagcggtccaaacgctggaaccccgaggtccagtttacctccaactacggacagcaaaactctctgttgtgggctcccgatgcggctgggaaatacactgagcctagggctatcggtacccgctacctcacccaccacctgtaa

SEQ ID NO: 794 - DNA, 2205 bp, Artificial Sequence
  source: /note="Description of Artificial Sequence: Synthetic polynucleotide"
atgactgacggttaccttccagattggctagaggacaacctctctgaaggcgttcgagagtggtgggcgctgcaacctggagcccctaaacccaaggcaaatcaacaacatcaggacaacgctcggggtcttgtgcttccgggttacaaatacctcggacccggcaacggactcgacaagggggaacccgtcaacgcagcggacgcggcagccctcgagcacgacaaggcctacgaccagcagctcaaggccggtgacaacccctacctcaagtacaaccacgccgacgcggagttccagcagcggcttcagggcgacacatcgtttgggggcaacctcggcagagcagtcttccaggccaaaaagagggttcttgaacctcttggtctggttgagcaagcgggtgagacggctcctggaaagaagagaccgttgattgaatccccccagcagcccgactcctccacgggtatcggcaaaaaaggcaagcagccggctaaaaagaagctcgttttcgaagacgaaactggagcaggcgacggaccccctgagggatcaacttccggagccatgtctgatgacagtgagatgcgtgcagcagctggcggagctgcagtcgagggcggacaaggtgccgatggagtgggtaatgcctcgggtgattggcattgcgattccacctggtctgagggccacgtcacgaccaccagcaccagaacctgggtcttgcccacctacaacaaccacctctacaagcgactcggagagagcctgcagtccaacacctacaacggattctccaccccctggggatactttgacttcaaccgcttccactgccacttctcaccacgtgactggcagcgactcatcaacaacaactggggcatgcgacccaaagccatgcgggtcaaaatcttcaacatccaggtcaaggaggtcacgacgtcgaacggcgagacaacggtggctaataaccttaccagcacggttcagatctttgcggactcgtcgtacgaactgccgtacgtgatggatgcgggtcaagagggcagcctgcctccttttcccaacgacgtctttatggtgccccagtacggctaccgtggactggtgaccggcaacacttcgcagcaacagactgacagaaatgccttctactgcctggagtactttccttcgcagatgctgcggactggcaacaactttgaaattacgtacagttttgagaaggtgcctttccactcgatgtacgcgcacagccagagcctggaccggctgatgaaccctctcatcgaccagtacctgtggggactgcaatcgaccaccaccggaaccaccctgaatgccgggactgccaccaccaactttaccaagctgcggcctaccaacttttccaactttaaaaagaactggctgcccgggccttcaatcaagcagcagggcttctcaaagactgccaatcaaaactacaagatccctgccaccgggtcagacagtctcatcaaatacgagacgcacagcactctggacggaagatggagtgccctgacccccggacctccaatggccacggctggacctgcggacagcaagttcagcaacagccagctcatctttgcggggcctaaacagaacggcaacacggccaccgtacccgggactctgatcttcacctctgaggaggagctggcagccaccaacgccaccgatacggacatgtggggcaacctacctggcggtgaccagagcaacagcaacctgccgaccgtggacagactgacagccttgggagccgtgcctggaatggtctggcaaaacagagacatttactaccagggtcccatttgggccaagattcctcataccgatggacactttcacccctcaccgctgattggtgggtttgggctgaaacacccgcctcctcaaatttttatcaagaacaccccggtacctgcgaatcctgcgacgaccttcagctctactccggtaaactccttcattactcagtacagcactggccaggtgtcggtgcagattgactgggagatccagaaggagcggtccaaacgctggaaccccgaggtccagtttacctccaactacggacagcaaaactctctgttgtgggctcccgatgcggctgggaaatacactgagcctagggctatcggtacccgctacctcacccaccacctgtaa

SEQ ID NO: 795 - DNA, 2205 bp, Artificial Sequence
  source: /note="Description of Artificial Sequence: Synthetic polynucleotide"
atgactgacggttaccttccagattggctagaggacaacctctctgaaggcgttcgagagtggtgggcgctgcaacctggagcccctaaacccaaggcaaatcaacaacatcaggacaacgctcggggtcttgtgcttcagggttacaaatacctcggacccggcaacggactcgacaagggggaacccgtcaacgcagcggacgcggcagccctcgagcacgacaaggcctacgaccagcagctcaaggccggtgacaacccctacctcaagtacaaccacgccgacgcggagttccagcagcggcttcagggcgacacatcgtttgggggcaacctcggcagagcagtcttccaggccaaaaagagggttcttgaaccccttggtctggttgagcaagcgggtgagacggctcctggaaagaagagaccgttgattgaatccccccagcagcccgactcctccacgggtatcggcaaaaaaggcaagcagccggctaaaaagaagctcgttttcgaagacgaaactggagcaggcgacggaccccctgagggatcaacttccggagccatgtctgatgacagtgagatgcgtgcagcagctggcggagctgcagtcgagggcggacaaggtgccgatggagtgggtaatgcctcgggtgattggcattgcgattccacccggtctgagggccacgtcacgaccaccagcaccagaacctgggtcttgcccacctacaacaaccacctctacaagcgactcggagagagcctgcagtccaacacctacaacggattctccaccccctggggatactttgacttcaaccgcttccactgccacttctcaccacgtgactggcagcgactcatcaacaataactggggcatgcgacccaaagccatgcgggtcaaaatcttcaacatccaggtcaaggaggtcacgacgtcgaacggcgagacaacggtggctaataaccttaccagcacggttcagatctttgcggactcgtcgtacgaactgccgtacgtgatggatgcgggtcaagagggcagcctgcctccttttcccaacgacgtctttatggtgccccagtacggctactgtggactggtgaccggcaacacttcgcagcaacagactgacagaaatgccttctactgcctggagtactttccttcgcagatgctgcggactggcaacaactttgaaattacgtacagttttgagaaggtgcctttccactcgatgtacgcgcacagccagagcctggaccggctgatgaaccctctcatcgaccagtacctgtggggactgcaatcgaccaccaccggaaccaccctgaatgccgggactgccaccaccaactttaccaagctgcggcctaccaacttttccaactttaaaaagaactggctgcccgggccttcaatcaagcagcagggcttctcaaagactgccaatcaaaactacaagatccctgccaccgggtcagacagtctcatcaaatacgagacgcacagcactctggacggaagatggagtgcccggacccccggacctccaatggccacggctggacctgcggacagcaagttcagcaacagccagctcatctttgcggggcctaaacagaacggcaacacggccaccgtacccgggactctgatcttcacctctgaggaggagctggcagccaccaacgccaccgatacggacatgtggggcaacctacctggcggtgaccagagcaacagcaacctgccgaccgtggacagactgacagccttgggagccgtgcctggaatggtctggcaaaacagagacatttactaccagggtcccatttgggccaagattcctcataccgatggacactttcacccctcaccgctgattggtgggtttgggctgaaacacccgcctcctcaaatttttatcaagaacaccccggtacctgcgaatcctgcgacgaccttcagctctactccggtaaactccttcattactcagtacagcactggccaggtgtcggtgcagattgactgggagatccagaaggagcggtccaaacgctggaaccccgaggtccagtttacctccaactacggacagcaaaactctctgttgtgggctcccgatgcggctgggaaatacactgagcctagggctatcggtacccgctacctcacccaccacctgtaa

SEQ ID NO: 796 - DNA, 2175 bp, Artificial Sequence
  source: /note="Description of Artificial Sequence: Synthetic polynucleotide"
atgtcttttgttgatcaccctccagattggttggaagaagttggtgaaggtcttcgcgagtttttgggccttgaagcgggcccaccgaaaccaaaacccaatcagcagcatcaagatcaagcccgtggtcttgtgctgcctggttataactatctcggacccggaaacggtctcgatcgaggagagcctgtcaacagggcagacgaggtcgcgcgagagcacgacatctcgtacaacgagcagcttgaggcgggagacaacccctacctcaagtacaaccacgcggacgccgagtttcaggagaggctcgccgacgacacatccttcgggggaaacctcggaaaggcagtctttcaggccaagaaaagggttctcgaaccttttggcctggttgaagagggtgctaagacggcccctaccggaaagcggatagacgaccactttccaaaaagaaagaaggcccggaccgaagaggactccaagccttccacctcgtcagacgccgaagctggacccagcggatcccagcagctgcaaatcccagcccaaccagcctcaagtttgggagctgatacaatgtctgcgggaggtggcggcccattgggcgacaataaccaaggtgccgatggagtgggcaatgcctcgggagattggcattgcgattccacgtggatgggggacagagtcgtcaccaagtccacccgaacctgggtgctgcccagctacaacaaccaccagtaccgagagatcaaaagcggctccgtcgacggaagcaacgccaacgcctactttggatacagcaccccctgggggtactttgactttaaccgcttccacagccactggagcccccgagactggcaaagactcatcaacaactactggggcttcagaccccggtccctcagagtcaaaatcttcaacattcaagtcaaagaggtcacggtgcaggactccaccaccaccatcgccaacaacctcacctccaccgtccaagtgtttacggacgacgactaccagctgccctacgtcgtcggcaacgggaccgagggatgcctgccggccttccctccgcaggtctttacgctgccgcagtacggttacgcgacgctgaaccgcgacaacacagaaaatcccaccgagaggagcagcttcttctgcctagagtactttcccagcaagatgctgagaacgggcaacaactttgagtttacctacaactttgaggaggtgcccttccactccagcttcgctcccagtcagaacctcttcaagctggccaacccgctggtggaccagtacttgtaccgcttcgtgagcacaaataacactggcggagtccagttcaacaagaacctggccgggagatacgccaacacctacaaaaactggttcccggggcccatgggccgaacccagggctggaacctgggctccggggtcaaccgcgccagtgtcagcgccttcgccacgaccaataggatggagctcgagggcgcgagttaccaggtgcccccgcagccgaacggcatgaccaacaacctccagggcagcaacacctatgccctggagaacactatgatcttcaacagccagccggcgaacccgggcaccaccgccacgtacctcgagggcaacatgctcatcaccagcgagagcgagacgcagccggtgaaccgcgtggcgtacaacgtcggcgggcagatggccaccaacaaccagagctccaccactgcccccgcgaccggcacgtacaacctccaggaaatcgtgcccggcagcgtgtggatggagagggacgtgtacctccaaggacccatctgggccaagatcccagagacggaggcgcactttcacccctctccggccatgggcggattcggactcaaacacccaccgcccatgatgctcatcaagaacacgcctgtgcccggaaatatcaccagcttctcggacgtgcccgtcagcagcttcatcacccagtacagcaccgggcaggtcaccgtggagatggagtgggagctcaagaaggaaaactccaagaggtggaacccagagatccagtacacaaacaactacaacgacccccagtttgtggactttgccccggacagcaccggggaatacagaaccaccagacctatcggaacccgataccttacccgacccctttaa

SEQ ID NO: 797 - DNA, 2175 bp, Artificial Sequence
  source: /note="Description of Artificial Sequence: Synthetic polynucleotide"
atgtcttttgttgatcaccctccagattggttggaagaagttggtgaaggtcttcgcgagtttttgggccttgaagcgggcccaccgaaaccaaaacccaatcagcagcatcaagatcaagcccgtggtcttgtgctgcctggttataactatctcggacccggaaacggtctcgatcgaggagagcctgtcaacagggcagacgaggtcgcgcgagagcacgacatctcgtacaacgagcagcttgaggcgggagacaacccctacctcaagtacaaccacgcggacgccgagtttcaggagaagctcgccgacgacacatcctccgggggaaacctcggaaaggcagtctttcaggccaagaaaagggttctcgaaccttttggcctggttgaagagggtgctaagacggcccctaccggaaagcggatagacgaccactttccaaaaagaaagaaggcccggaccgaagaggactccaagccttccacctcgtcagacgccgaagctggacccagcggatcccagcagctgcaaatcccagcccaaccagcctcaagtttgggagctgatacaatgtctgcgggaggtggcggcccattgggcgacaataaccaaggtgccgatggagtgggcaatgcctcgggagattggcattgcgattccacgtggatgggggacagagtcgtcaccaagtccacccgaacctgggtgctgcccagctacaacaaccaccagtaccgagagatcaaaagcggctccgtcgacggaagcaacgccaacgcctactttggatacagcaccccctgggggtactttgactttaaccgcttccacagccactggagcccccgagactggcaaagactcatcaacaactactggggcttcagaccccggtccctcagagtcaaaatcttcaacattcaagtcaaagaggtcacggtgcaggactccaccaccaccatcgccaacaacctcacctccaccgtccaagtgtttacggacgacgactaccagctgccctacgtcgtcggcaacgggaccgagggatgcctgccggccttccctccgcaggtctttacgctgccgcagtacggttacgcgacgctgaaccgcgacaacacagaaaatcccaccgagaggagcagcttcttctgcctagagtactttcccagcaagatgctgagaacgggcaacaactttgagtttacctacaactttgaggaggtgcccttccactccagcttcgctcccagtcagaacctcttcaagctggccaacccgctagtggaccagtacttgtaccgcttcgtgagcacaaataacactggcggagtccagttcaacaagaacctggccgggagatacgccaacacctacaaaaactggttcccggggcccatgggccgaacccagggctggaacctgggctccggggtcaaccgcgccagtgtcagcgccttcgccacgaccaataggatggagctcgagggcgcgagttaccaggtgcccccgcagccgaacggcatgaccaacaacctccagggcagcaacacctatgccctggagaacactatgatcttcaacagccagccggcgaacccgggcaccaccgccacgtacctcgagggcaacatgctcatcaccagcgagagcgagacgcagccggtgaaccgcgtggcgtacaacgtcggcgggcagatggccaccaacaaccagagctccaccactgcccccgcgaccggcacgtacaacctccaggaaatcgtgcccggcagcgtgtggatggagagggacgtgtacctccaaggacccatctgggccaagatcccagagacgggggcgcactttcacccctctccggccatgggcggattcggactcaaacacccaccgcccatgatgctcatcaagaacacgcctgtgcccggaaatatcaccagcttctcggacgtgcccgtcagcagcttcatcacccagtacagcaccgggcaggtcaccgtggagatggagtgggagctcaagaaggaaaactccaagaggtggaacccagagatccagtacacaaacaactacaacgacccccagtttgtggactttgccccggacagcaccggggaatacagaaccaccagacctatcggaacccgataccttacccgacccctttaa

SEQ ID NO: 798 - DNA, 2175 bp, Artificial Sequence
  source: /note="Description of Artificial Sequence: Synthetic polynucleotide"
atgtcttttgttgatcaccctccagattggttggaagaagttggtgaaggtcttcgcgagtttttgggccttgaagcgggcccaccgaaaccaaaacccaatcagcagcatcaagatcaagcccgtggtcttgtgctgcctggttataactatctcggacccggaaacggtctcgatcgaggagagcctgtcaacagggcagacgaggtcgcgcgagagcacgacatctcgtacaacgagcagcttgaggcgggagacaacccctacctcaagtacaaccacgcggacgccgagtttcaggagaagctcgccgacgacacatccttcgggggaaacctcggaaaggcagtctttcaggccaagaaaagggttctcgaaccttttggcctggttgaagagggtgctaagacggcccctaccggaaagcggatagacgaccactttccaaaaagaaagaaggcccggaccgaagaggactccaagccttccacctcgtcagacgccgaagctggacccagcggatcccagcagctgcaaatcccagcccaaccagcctcaagtttgggagctgatacaatgtctgcgggaggtggcggcccattgggcgacaataaccaaggtgccgatggagtgggcaatgcctcgggagattggcattgcgattccacgtggatgggggacagagtcgtcaccaagtccacccgaacctgggtgctgcccagctacaacaaccaccagtaccgagagatcaaaagcggctccgtcgacggaagcaacgccaacgcctactttggatacagcaccccctgggggtactttgactttaaccgcttccacagccactggagcccccgagactggcaaagactcatcaacaactactggggcttcagaccccggtccctcagagtcaaaatcttcaacattcaagtcaaagaggtcacggtgcaggactccaccaccaccatcgccaacaacctcacctccaccgtccaagtgtttacggacgacgactaccagctgccctacgtcgtcggcaacgggaccgagggatgcctgccggccttccctccgcaggtctttacgctgccgcagtacggttacgcgacactgaaccgcgacaacacagaaaatcccaccgagaggagcagcttcttctgcctagagtactttcccagcaagatgctgagaacgggcaacaactttgagtttacctacaactttgaggaggtgcccttccactccagcttcgctcccagtcagaacctcttcaagctggccaacccgctggtggaccagtacttgtaccgcttcgtgagcacaaataacactggcggagtccagttcaacaagaacctggccgggagatacgccaacacctacaaaaactggttcccggggcccatgggccgaacccagggctggaacctgggctccggggtcaaccgcgccagtgtcagcgccttcgccacgaccaataggatggagctcgagggcgcgagttaccaggtgcccccgcagccgaacggcatgaccaacaacctccagggcagcaacacctatgccctggagaacactatgatcttcaacagccagccggcgaacccgggcaccaccgccacgtacctcgagggcaacatgctcatcaccagcgagagcgagacgcagccggtgaaccgcgtggcgtacaacgtcggcgggcagatggccaccaacaaccagagctccaccactgcccccgcgaccggcacgtacaacctccaggaaatcgtgcccggcagcgtgtggatggagagggacgtgtacctccaaggacccatctgggccaagatcccagagacgggggcgcactttcacccctctccggccatgggcggattcggactcaaacacccaccgcccatgatgctcatcaagagcacgcctgtgcccggaaatatcaccagcttctcggacgtgcccgtcagcagcttcatcacccagtacagcaccgggcaggtcaccgtggagatggagtgggagctcaagaaggaaaactccaagaggtggaacccagagatccagtacacaaacaactacaacgacccccagtttgtggactttgccccggacagcaccggggaatacagaaccaccagacctatcggaacccgataccttacccgacccctttaa

SEQ ID NO: 799 - DNA, 2175 bp, Artificial Sequence
  source: /note="Description of Artificial Sequence: Synthetic polynucleotide"
atgtcttttgttgatcaccctccagattggttggaagaagttggtgaaggtcttcgcgagtttttgggccctgaagcgggcccaccgaaaccaaaacccaatcagcagcatcaagatcaagcccgtggtcttgtgctgcctggttataactatctcggacccggaaacggtctcgatcgaggagagcctgtcaacagggcagacgaggtcgcgcgagagcacgacatctcgtacaacgagcagcttgaggcgggagacaacccctacctcaagtacaaccacgcggacgccgagtttcaggagaagctcgccgacgacacatccttcgggggaaacctcggaaaggcagtctttcaggccaagaaaagggttctcgaaccttttggcctggttgaagagggtgctaagacggcccctaccggaaagcggatagacgaccactttccaaaaagaaagaaggtccggaccgaagaggactccaagccttccacctcgtcagacgccgaagctggacccagcggatcccagcagctgcaaatcccagcccaaccagcctcaagtttgggagctgatacaatgtctgcgggaggtggcggcccattgggcgacaataaccaaggtgccgatggagtgggcaatgcctcgggagattggcattgcgattccacgtggatgggggacagagtcgtcaccaagtccacccgaacctgggtgccgcccagctacaacaaccaccagtaccgagagatcaaaagcggctccgtcgacggaagcaacgccaacgcctactttggatacagcaccccctgggggtactttgactttaaccgcttccacagccactggagcccccgagactggcaaagactcatcaacaactactggggcttcagaccccggtccctcagagtcaaaatcttcaacattcaagtcaaagaggtcacggtgcaggactccaccaccaccatcgccaacaacctcacctccaccgtccaagtgtttacggacgacgactaccagctgccctacgtcgtcggcaacgggaccgagggatgcctgccggccttccctccgcaggtctttacgctgccgcagtacggttacgcgacgctgaaccgcgacaacacagaaaatcccaccgagaggagcagcttcttctgcctagagtactttcccagcaagatgctgagaacgggcaacaactttgagtttacctacaactttgaggaggtgcccttccactccagcttcgctcccagtcagaacctcttcaagctggccaacccgctggtggaccagtacttgtaccgcttcgtgagcacaaataacactggcggagtccagttcaacaagaacctggccgggagatacgccaacacctacaaaaactggttcccggggcccatgggccgaacccagggctggaacctgggctccggggtcaaccgcgccagtgtcagcgccttcgccacgaccaataggatggagctcgagggcgcgagttaccaggtgcccccgcagccgaacggcatgaccaacaacctccagggcagcaacacctatgccctggagaacactatgatcttcaacagccagccggcgaacccgggcaccaccgccacgtacctcgagggcaacatgctcatcaccagcgagagcgagacgcagccggtgaaccgcgtggcgtgcaacgtcggcgggcagatggccaccaacaaccagagctccaccactgcccccgcgaccggcacgtacaacctccaggaaatcgtgcccggcagcgtgtggatggagagggacgtgtacctccaaggacccatctgggccaagatcccagagacgggggcgcactttcacccctctccggccatgggcggattcggactcaaacacccaccgcccatgatgctcatcaagaacacgcctgtgcccggaaatatcaccagcttctcggacgtgcccgtcagcagcttcatcacccagtacagcaccgggcaggtcaccgtggagatggagtgggagctcaagaaggaaaactccaagaggtggaacccagagatccagtacacaaacaactacaacgacccccagtttgtggactttgccccggacagcaccggggaatacagaaccaccagacctattggaacccgataccttacccgacccctttaa

SEQ ID NO: 800 - DNA, 2175 bp, Artificial Sequence
  source: /note="Description of Artificial Sequence: Synthetic polynucleotide"
atgtcttttgttgatcaccctccagattggttggaagaagttggtgaaggtcttcgcgagtttttgggccttgaagcgggcccaccgaaaccaaaacccaatcagcagcatcaagatcaagcccgtggtcttgtgctgcctggttataactatctcggacccggaaacggtctcgatcgaggagagcctgtcaacagggcagacgaggtcgcgcgagagcacgacatctcgtacaacgagcagcttgaggcgggagacaacccctacctcaagtacaaccacgcggacgccgagtttcaggagaagctcgccgacgacacatccttcgggggaaacctcggaaaggcagtctttcaggccaagaaaagggttctcgaaccttttggcctggttgaagagggtgctaagacggcccctaccggaaagcggatagacgaccactttccaaaaagaaagaaggcccggaccgaagaggactccaagccttccacctcgtcagacgccgaagctggacccagcggatcccagcagctgcaaatcccagcccaaccagcctcaagtttgggagctgatacaatgtctgcgggaggtggcggcccattgggcgacaataaccaaggtgccgatggagtgggcaatgcctcgggagattggcattgcgattccacgtggatgggggacagagtcgtcaccaagtccacccgaacctgggtgctgcccagctacaacaaccaccagtaccgagagatcaaaagcggctccgtcgacggaagcaacgccaacgcctactttggatacagcaccccctgggggtactttgactttaaccgcttccacagccactggagcccccgagactggcaaagactcatcaacaactactggggcttcagaccccggtccctcagagtcaaaatcttcaacattcaagtcaaagaggtcacggtgcaggactccaccaccaccatcgccaacaacctcacctccaccgtccaagtgtttacggacgacgactaccagctgccctacgtcgtcggcaacgggaccgagggatgcctgccggccttccctccgcaggtctttacgctgccgcagtacggttacgcgacgctgaaccgcgacaacaccgaaaatcccaccgagaggagcagcttcttctgcctagagtactttcccagcaagatgctgagaacgggcaacaactttgagtttacctacaactttgaggaggtgcccttccactccagcttcgctcccagtcagaacctcttcaagctggccaacccgctggtggaccagtacttgtaccgcttcgtgagcacaaataacactggcggagtccagttcaacaagaacctggccgggagatacgccaacacctacaaaaactggttcccggggcccatgggccgaacccagggctggaacctgggctccggggtcaaccgcgccagtgtcagcgccttcgccacgaccaataggatggagctcgagggcgcgagttaccaggtgcccccgcagccgaacggcatgaccaacaacctccagggcagcaacacctatgccctggagaacactatgatcttcaacagccagccggcgaacccgggcaccaccgccacgtacctcgagggcaacatgctcatcaccagcgagagcgagacgcagccggtgaaccgcgtggcgtacaacgtcggcgggcagatggccaccaacaaccagagctccaccactgcccccgcgaccggcgcgtacaacctccaggaaatcgtgcccggcagcgtgtggatggagagggacgtgtacctccaaggacccatctgggccaagatcccagagacgggggcgcactttcacccctctccggccatgggcggattcggactcaaacacccaccgcccatgatgctcatcaagaacacgcctgtgcccggaaatatcaccagcttctcggacgtgcccgtcagcagcttcatcacccagtacagcaccgggcaggtcaccgtggagatggagtgggagctcaagaaggaaaactccaagaggtggaacccagagatccagtacacaaacaactacaacgacccccagtttgtggactttgccccggacagcaccggggaatacagaaccaccagacctatcggaacccgataccttacccgacccctttaa

SEQ ID NO: 801 - DNA, 2175 bp, Artificial Sequence
  source: /note="Description of Artificial Sequence: Synthetic polynucleotide"
atgtcttttgttgatcaccctccagattggttggaagaagttggtgaaggtcttcgcgagtttttgggccttgaagcgggcccaccgaaaccaaaacccaatcagcagcatcaagatcaagcccgtggtcttgtgctgcctggttataactatctcggacccggaaacggtctcgatcgaggagagcctgtcaacagggcagacggggtcgcgcgagagcacgacatctcgtacaacgagcagcttgaggcgggagacaacccctacctcaagtacaaccacgcggacgccgagtttcaggagaagctcgccgacgacacatccttcgggggaaacctcggaaaggcagtctttcaggccaagaaaagggttctcgaaccttttggcctggttgaagagggtgctaagacggcccctaccggaaagcggatagacgaccactttccaaaaagaaagaaggcccggaccgaagaggactccaagccttccacctcgtcagacgccgaagctggacccagcggatcccagcagctgcaaatcccagcccaaccagcctcaagtttgggagctgatacaatgtctgcgggaggtggcggcccattgggcgacaataaccaaggtgccgatggagtgggcaatgcctcgggagattggcattgcgattccacgtggatgggggacagagtcgtcaccaagtccacccgaacctgggtgctgcccagctacaacaaccaccagtaccgagagatcaaaagcggctccgtcgacggaagcaacgccaacgcctactttggatacagcaccccctgggggtactttgactttaaccgcttccacagccactggagcccccgagactggcaaagactcatcaacaactactggggcttcagaccccggtccctcagagtcaaaatcttcaacattcaagtcaaagaggtcacggtgcaggactccaccaccaccatcgccaacaacctcacctccaccgtccaagcgtttacggacgacgactaccagctgccctacgtcgtcggcaacgggaccgagggatgcctgccggccttccctccgcaggtctttacgctgccgcagtacggttacgcgacgctgaaccgcgacaacacagaaaatcccaccgagaggagcagcttcttctgcctagagtactttcccagcaagatgctgagaacgggcaacaactttgagtttacctacaactttgaggaggtgcccttccactccagcttcgctcccagtcagaacctcttcaagctggccaacccgctggtggaccagtacttgtaccgcttcgtgagcacaaataacactggcggagtccagttcaacaagaacctggccgggagatacgccaacacctacaaaaactggttcccggggcccatgggccgaacccagggctggaacctgggctccggggtcaaccgcgccagtgtcagcgccttcgccacgaccaataggatggagctcgagggcgcgagttaccaggtgcccccgcagccgaacggcatgaccaacaacctccagggcagcaacacctatgccctggagaacactatgatcttcaacagccagccggcgaacccgggcaccaccgccacgtacctcgagggcaacatgctcatcaccagcgagagcgagacgcagccggtgaaccgcgtggcgtacaacgtcggcgggcagatggccaccaacaaccagagctccaccactgcccccgcgaccggcacgtacaacctccaggaaatcgtgcccggcagcgtgtggatggagagggacgtgtacctccaaggacccatctgggccaagatcccagagacgggggcgcactttcacccctctccggccatgggcggattcggactcaaacacccaccgcccatgatgctcatcaagaacacgcctgtgcccggaaatatcaccagcttctcggacgtgcccgtcagcagcttcatcacccagtacagcaccgggcaggtcaccgtggagatggagtgggagctcaagaaggaaaactccaagaggtggaacccagagatccagtacacaaacaactacaacgacccccagtttgtggactttgccccggacagcaccggggaatacagaaccaccagacctatcggaacccgataccttacccgacccctttaa

SEQ ID NO: 802 - DNA, 2175 bp, Artificial Sequence
  source: /note="Description of Artificial Sequence: Synthetic polynucleotide"
atgtcttttgttgatcaccctccagattggttggaagaagttggtgaaggtcttcgcgagtttttgggccttgaagcgggcccaccgaaaccaaaacccaatcagcagcatcaagatcaagcccgtggtcttgtgctgcctggttataactatctcggacccggaaacggtctcgatcgaggagagcctgtcaacagggcagacgaggtcgcgcgagagcacgacatctcgtacaacgagcagcttgaggcgggagacaacccctacctcaagtacaaccacgcggacgccgagtttcaggagaagctcgccgacgacacatccttcgggggaaacctcggaaaggcagtctttcaggccaagaaaagggttctcgaaccttttggcctggttgaagagggtgctaagacggcccctaccggaaagcggatagacgaccactttccaaaaagaaagaaggcccggaccgaagaggactccaagccttccacctcgtcagacgccgaagctggacccagcggatcccagcagctgcaaatcccagcccaaccagcctcaagtttgggagctgatacaatgtctgcgggaggtggcggcccattgggcgacaataaccaaggtgccgatggagtgggcaatgcctcgggagattggcattgcgattccacgtggatgggggacagagtcgtcaccaagtccacccgaacctgggtgctgcccagctacaacaaccaccagtaccgagagatcaaaagcggctccgtcgacggaagcaacgccaacgcctactttggatacagcaccccctgggggtactttgactttaaccgcttccacagccactggagcccccgagactggcaaagactcatcaacaactactggggcttcagaccccggtccctcagagtcaaaatcttcaacattcaagtcaaagaggtcacggtgcaggactccaccaccaccatcgccaacaacctcacctccaccgtccaagtgtttacggacgacgactaccagctgccctacgtcgtcggcaacgggaccgagggatgcctgccggccttccctccgcaggtctttacgctgccgcagtacggttacgcgacgctgaaccgcgacaacacagaaaatcccaccgagaggagcagcttcttctgcctagagtactttcccagcaagatgctgagaacgggcaacaactttgagtttacctacaactttgaggaggtgcccttccactccagcttcgctcccagtcagaacctcttcaagctggccaacccgctggtggaccagtacttgtaccgcttcgtgagcacaaataacactggcggagtccagttcaacaagaacctggccgggagatacgccaacacctacaaaaactggttcccggggcccatgggccgaacccagggctggaacctgggctccggggtcaaccgcgccagtgtcagcgccttcgccacgaccaataggatggagctcgagggcgcgagttactaggtgcccccgcagccgaacggcatgaccaacaacctccagggcagcaacacctatgccctggagaacactatgatcttcaacagccagccggcgaacccgggcaccaccgccacgtacctcgagggcaacatgctcatcaccagcgagagcgagacgcagccggtgaaccgcgtggcgtacaacgtcggcgggcagatggccaccaacaaccagagctccaccactgcccccgcgaccggcacgtacaacctccaggaaatcgtgcccggcagcgtgtggatggagggggacgtgtacctccaaggacccatctgggccaagatcccagagacgggggcgcactttcacccctctccggccatgggcggattcggactcaagcacccaccgcccatgatgctcatcaagaacacgcctgtgcccggaaatatcaccagcttctcggacgtgcccgtcagcagcttcatcacccagtacagcaccgggcaggtcaccgtggagatggagtgggagctcaagaaggaaaactccaagaggtggaacccagagatccagtacacaaacaactacaacgacccccagtttgtggactttgccccggacagcaccggggaatacagaaccaccagacctatcggaacccgataccttacccgacccctttaa

SEQ ID NO: 803 - DNA, 2175 bp, Artificial Sequence
  source: /note="Description of Artificial Sequence: Synthetic polynucleotide"
atgtcttttgttgatcaccctccagattggttggaagaagttggtgaaggtcttcgcgagtttttgggccttgaagcgggcccaccgaaaccaaaacccaatcagcagcatcaagatcaagcccgtggtcttgtgctgcctggttataactatctcggacccggaaacggtctcgatcgaggagagcctgtcaacagggcagacgaggtcgcgcgagagcacgacatctcgtacaacgagcagcttgaggcgggagacaacccctacctcaagtacaaccacgcggacgccgagtttcaggagaagctcgccgacgacacatccttcgggggaaacctcggaaaggcagtctttcaggccaagaaaagggttctcgaaccttttggcctggttgaagagggtgctaagacggcccctaccggaaagcggatagacgaccactttccaaaaagaaagaaggtccggaccgaagaggactccaagccttccacctcgtcagacgccgaagctggacccagcggatcccagcagctgcaaatcccagcccaaccagcctcaagtttgggagctgatacaatgtctgcgggaggtggcggcccattgggcgacaataaccaaggtgccgatggagtgggcaatgcctcgggagattggcattgcgattccacgtggatgggggacagagtcgtcaccaagtccacccgaacctgggtgctgcccagctacaacaaccaccagtaccgagagatcaaaagcggctccgtcgacggaagcaacgccaacgcctactttggatacagcaccccctgggggtactttgactttaaccgcttccacagccactggagcccccgagactggcaaagactcatcaacaactactggggcttcagaccccggtccctcagagtcaaaatcttcaacattcaagtcaaagaggtcacggtgcaggactccaccaccaccatcgccaacaacctcacctccaccgtccaagtgtttacggacgacgactaccagctgccctacgtcgtcggcaacgggaccgagggatgcctgccggccttccctccgcaggtctttacgctgccgcagtacggttacgcgacgctgaaccgcgacaacacagaaaatcccaccgagaggagcagcttcttctgcctagagtactttcccagcaagatgctgagaacgggcaacaactttgagtttacctacaactttgaggaggtgcccttccactccagcttcgctcccagtcagaacctcttcaagctggccaacccgctggtggaccagtacttgtaccgcttcgtgagcacaaataacactggcggagtccagttcaacaagaacctggccgggagatacgccaacacctacaaaaactggttcccggggcccatgggccgaacccagggctggaacctgggctccggggtcaaccgcgccagtgtcagcgccttcgccacgaccaataggatggagctcgagggcgcgagttaccaggtgcccccgcagccgaacggcatgaccaacaacctccagggcagcaacacctatgccctggagaacactatgatcttcaacagccagccggcgaacccgggcaccaccgccacgtacctcgagggcaacatgctcatcaccagcgagagcgagacgcagccggtgaaccgcgtggcgtacaacgtcggcgggcagatggccaccaacaaccagagctccaccactgcccccgcgaccggcacgtacaacctccaggaaatcgtgcccggcagcgtgtggatggagagggacgtgtacctccaaggacccatctgggccaagatcccagagacgggggcgcactttcacccctctccggccatgggcggattcggactcaaacacccaccgcccatgatgctcatcaagaacacgcctgtgcccggaaatatcaccagcttctcggacgtgcccgtcagcagcttcatcacccagtacagcaccgggcaggtcaccgtggagatggagtgggagctcaagaaggaaaactccgagaggtggaacccagagatccagtacacaaacaactacaacgacccccagtttgtggactttgccccggacagcaccggggaatacagaaccaccagacctattggaacccgataccttacccgacccctttaa

SEQ ID NO: 804 - DNA, 2175 bp, Artificial Sequence
  source: /note="Description of Artificial Sequence: Synthetic polynucleotide"
atgtcttttgttgatcaccctccagattggttggaagaagttggtgaaggtcttcgcgagtttttgggccttgaagcgggcccaccgaaaccaaaacccaatcagcagcatcaagatcaagcccgtggtcttgtgctgcctggttataactatctcggacccggaaacggtctcgatcgaggagagcctgtcaacagggcagacgaggtcgcgcgagagcacgacatctcgtacagcgagcagcttgaggcgggagacaacccctacctcaagtacaaccacgcggacgccgagtttcaggagaagctcgccgacgacacatccttcgggggaaacctcggaaaggcagtctttcaggccaagaaaagggttctcgaaccttttggcctggttgaagagggtgctaagacggcccctaccggaaagcggatagacgaccactttccaaaaagaaagaaggcccggaccgaagaggactccaagccttccacctcgtcagacgccgaagctggacccagcggatcccagcagctgcaaatcccagcccaaccagcctcaagtttgggagctgatacaatgtctgcgggaggtggcggcccattgggcgacaataaccaaggtgccgatggagtgggcaatgcctcgggagattggcattgcgattccacgtggatgggggacagagtcgtcaccaagtccacccgaacctgggtgctgcccagctacaacaaccaccagtaccgagagatcaaaagcggctccgtcgacggaagcaacgccaacgcctactttggatacagcaccccctgggggtactttgactttaaccgcttccacagccactggagcccccgagactggcaaagactcatcaacaactactggggcttcagaccccggtccctcagagtcaaaatcttcaacattcaagtcaaagaggtcacggtgcaggactccaccaccaccatcgccaacaacctcacctccaccgtccaagtgtttacggacgacgactaccagctgccctacgtcgtcggcaacgggaccgagggatgcctgccggccttccctccgcaggtctttacgctgccgcagtacggttacgcgacgctgaaccgcgacaacacagaaaatcccaccgagaggagcagcttcttctgcctagagtactttcccagcaagatgctgagaacgggcaacaactttgagtttacctacaactttgaggaggtgcccttccactccagcttcgctcccagtcagaacctcttcaagctggccaacccgctggtggaccagtacttgtaccgcttcgtgagcacaaataacactggcggagtccagttcaacaagaacctggccgggagatacgccaacacctacaaaaactggttcccggggcccatgggccgaacccagggctggaacctgggctccggggtcaaccgcgccagtgtcagcgccttcgccacgaccaataggatggagctcgagggcgcgagttaccaggtgcccccgcagccgaacggcatgaccaacaacctccagggcagcaacacctatgccctggagaacactatgatcttcaacagccagccggcgaacccgggcaccaccgccacgtacctcgagggcaacatgctcatcaccagcgagagcgagacgcagccggtgaaccgcgtggcgtacaacgtcggcgggcagatggccaccaacaaccagagctccaccactgcccccgcgaccggcacgtacaacctccaggaaatcgtgcccggcagcgtgtggatggagagggacgtgtacctccaaggacccatctgggccaagatcccagagacgggggcgcactttcacccctctccggccatgggcggattcggactcaaacacccaccgcccatgatgctcatcaagaacacgcctgtgcccggaaatatcaccagcttctcggacgtgcccgtcagcagcttcatcacccagtacagcaccgggcaggtcaccgtggagatggagtgggagctcaagaaggaaaactccaagaggtggaacccagagatccagtacacaaacaactacaacgacccccagtttgtggactttgccccggacagcaccggggaatacagaaccgccagacctatcggaacccgataccttacccgacccctttaa

SEQ ID NO: 805 - DNA, 2175 bp, Artificial Sequence
  source: /note="Description of Artificial Sequence: Synthetic polynucleotide"
atgtcttttgttgatcaccctccagattggttggaagaagttggtgaaggtcttcgcgagtttttgggccctgaagcgggcccaccgaaaccaaaacccaatcagcagcatcaagatcaagcccgtggtcttgtgctgcctggttataactatctcggacccggaaacggtctcgatcgaggagagcctgtcaacagggcagacgaggtcgcgcgagagcacgacatctcgtacaacgagcagcttgaggcgggagacaacccctacctcaagtacaaccacgcggacgccgagtttcaggagaagctcgccgacgacacatccttcgggggaaacctcggaaaggcagtctttcaggccaagaaaagggttctcgaaccttttggcctggttgaagagggtgctaagacggcccctaccggaaagcggatagacgaccactttccaaaaagaaagaaggcccggaccgaagaggactccaagccttccacctcgtcagacgccgaagctggacccagcggatcccagcagctgcaaatcccagcccaaccagcctcaagtttgggagctgatacaatgtctgcgggaggtggcggcccattgggcgacaataaccaaggtgccgatggagtgggcaatgcctcgggagattggcattgcgattccacgtggatgggggacagagtcgtcaccaagtccacccgaacctgggtgctgcccagctacaacaaccaccagtaccgagagatcaaaagcggctccgtcgacggaagcaacgccaacgcctactttggatacagcaccccctgggggtactttgactttaaccgcttccacagccactggagcccccgagactggcaaagactcatcaacaactactggggcttcagaccccggtccctcagagtcaaaatcttcaacattcaagtcaaagaggtcacggtgcaggactccaccaccaccatcgccaacaacctcacctccaccgtccaagtgtttacggacgacgactaccagctgccctacgtcgtcggcaacgggaccgagggatgcctgccggccttccctccgcaggtctttacgctgccgcagtacggttacgcgacgctgaaccgcgacaacacagaaaatcccaccgagaggagcagcttcttctgcctagagtactttcccagcaagatgctgagaacgggcaacaactttgagtttacctacaactttgaggaggtgcccttccactccagcttcgctcccagtcagaacctcttcaagctggccaacccgctggtggaccagtacttgtaccgcttcgtgagcacaaataacactggcggagtccagttcaacaagaacctggccgggagatacgccaacacctacaaaaactggttcccggggcccatgggccgaacccagggctggaacctgggctccggggtcaaccgcgccagtgtcagcgccttcgccacgaccaataggatggagctcgagggcgcgagttaccaggtgcccccgcagccgaacggcatgaccaacaacctccagggcagcaacacctatgccctggagaacactatgatcttcaacagccagccggcgaacccgggcaccaccgccacgtacctcgagggcaacatgctcatcaccagcgagagcgagacgcagccggtgaaccgcgtggcgtacaacgtcggcgggcagatgaccaccaacaaccagagctccaccactgcccccgcgaccggcacgtacaacctccaggaaatcgtgcccggcagcgtgtggatggagagggacgtgtacccccaaggacccatctgggccaagatcccagagacgggggcgcactttcacccctctccggccatgggcggattcggactcaaacacccaccgcccatgatgctcatcaagaacacgcctgtgcccggaaatatcaccagcttctcggacgtgcccgtcagcagcttcatcacccagtacagcaccgggcaggtcaccgtggagatggagtgggagctcaagaaggaaaactccaagaggtggaacccagagatccagtacacaaacaactacaacgacccccagtttgtggactttgccccggacagcaccggggaatacaggaccaccagacctatcggaacccgataccttacccgacccctttaa

SEQ ID NO: 806 - DNA, 2175 bp, Artificial Sequence
  source: /note="Description of Artificial Sequence: Synthetic polynucleotide"
atgtcttttgttgatcaccctccagattggttggaagaagttggtgaaggtcttcgcgagtttttgggccttgaagcgggcccaccgaaaccaaaacccaatcagcagcatcaagatcaagcccgtggtcttgtgctgcctggttataactatctcggacccggaaacggtctcgatcgaggagagcctgtcaacagggcagacgaggtcgcgcgagagcacgacatctcgtacaacgagcagcttgaggcgggagacaacccctacctcaagtacaaccacgcggacgccgagtttcaggagaagctcgccgacgacacatccttcgggggaaacctcggaaaggcagtctttcaggccaagaaaagggttctcgaaccttttggcctggttgaagagggtgctaagacggcccctaccggaaagcggatagacgaccactttccaaaaagaaagaaggcccggaccgaagaggactccaagccttccacctcgtcagacgccgaagctggacccagcggatcccagcagctgcaaatcccagcccaaccagcctcaagtttgggagctgatacaatgtctgcgggaggtggcggcccattgggcgacaataaccaaggtgccgatggagtgggcaatgcctcgggagattggcattgcgattccacgtggatgggggacagagtcgtcaccaagtccacccgaacctgggtgctgcccagctacaacaaccaccagtaccgagagatcaaaagcggctccgtcgacggaagcaacgccaacgcctactttggatacagcaccccctgggggtactttgactttaaccgcttccacagccactggagcccccgagactggcaaagactcatcaacaactactggggcttcagaccccggtccctcagagtcaaaatcttcaacattcaagtcaaagaggtcacggtgcaggactccaccaccaccatcgccaacaacctcacctccaccgtccaagtgtttacggacgacgactaccagctgccctacgtcgtcggcaacgggaccgagggatgcctgccggccttccctccgcaggtctttacgctgccgcagtacggttacgcgacgctgaaccgcgacaacacagaaaatcccaccgagaggagcagcttcctctgcctagagtactttcccagcaagatgctgagaacgggcaacaactttgagtttacctacaactttgaggaggtgcccttccactccagcttcgctcccagtcagaacctcttcaagctggccaacccgctggtggaccagtacttgtaccgcttcgtgagcacaaataacactggcggagtccagttcaacaagaacctggccgggagatacgccaacacctacaaaaactggttcccggggcccatgggccgaacccagggctggaacctgggctccggggtcaaccgcgccagtgtcagcgccttcgccacgaccaataggatggagctcgagggcgcgagttaccaggtgcccccgcagccgaacggcatgaccaacaacctccagggcagcaacacctatgccctggagaacactatgatcttcaacagccagccggcgaacccgggcaccaccgccacgtacctcgagggcaacatgctcatcaccagcgagagcgagacgcagccggtgaaccgcgtggcgtacaacgtcggcgggcagatggccaccaacaaccagagctccaccactgcccccgcgaccggcacgtacaacctccaggaaatcgtgcccggcagcgtgtggatgaagagggacgtgtacctccaaggacccatctgggccaagatcccagagacgggggcgcactttcacccctctccggccatgggcggattcggactcaaacacccaccgcccatgatgctcatcaagaacacgcctgtgcccggaaatatcaccagcttctcggacgtgcccgtcagcagcttcatcacccagtacagcaccgggcaggtcaccgtggagatggagtgggagctcaagaaggaaaactccaagaggtggaacccagagatccagtacacaaacaactacaacgacccccagtttgtggactttgccccggacagcaccggggaatacagaaccaccagacctatcggaacccgataccttacccgacccctttaa

SEQ ID NO: 807 - DNA, 2175 bp, Artificial Sequence
  source: /note="Description of Artificial Sequence: Synthetic polynucleotide"
atgtcttttgttgatcaccctccagattggttggaagaagttggtgaaggtcttcgcgagtttttgggccttgaggcgggcccaccgaaaccaaaacccaatcagcagcatcaagatcaagcccgtggtcttgtgctgcctggttataactatctcggacccggaaacggtctcgatcgaggagagcctgtcaacagggcagacgaggtcgcgcgagagcacgacatctcgtacaacgagcagcttgaggcgggagacaacccctacctcaagtacaaccacgcggacgccgagtttcaggagaagctcgccgacgacacatccttcgggggaaacctcggaaaggcagtctttcaggccaagaaaagggttctcgaaccttttggcctggttgaagagggtgctaagacggcccctaccggaaagcggatagacgaccactttccaaaaagaaagaaggcccggaccgaagaggactccaagccttccaccccgtcagacgccgaagctggacccagcggatcccagcagctgcaaatcccagcccaaccagcctcaagtttgggagctgatacaatgtctgcgggaggtggcggcccattgggcgacaataaccaaggtgccgatggagtgggcaatgcctcgggagattggcattgcgattccacgtggatgggggacagagtcgtcaccaagtccacccgaacctgggtgctgcccagctacaacaaccaccagtaccgagagatcaaaagcggctccgtcgacggaagcaacgccaacgcctactttggatacagcaccccctgggggtactttgactttaaccgcttccacagccactggagcccccgagactggcaaagactcatcaacaactactggggcttcagaccccggtccctcagagtcaaaatcttcaacattcaagtcaaagaggtcacggtgcaggactccaccaccaccatcgccaacaacctcacctccaccgtccaagtgtttacggacgacgactaccagctgccctacgtcgtcggcaacgggaccgagggatgcctgccggccttccctccgcaggtctttacgctgccgcagtacggttacgcgacgctgaaccgcgacaacacagaaaatcccaccgagaggagcagcttcttctgcctagagtactttcccagcaagatgctgagaacgggcaacaactttgagtttacctacaactttgaggaggtgcccttccactccagcttcgctcccagtcagaacctcttcaagctggccaacccgctggtggaccagtacttgtaccgcttcgtgagcacaaataacactggcggagtccagttcaacaagaacctggccgggagatacgccaacacctacaaaaactggttcccggggcccatgggccgaacccagggctggaacctgggctccggggtcaaccgcgccagtgtcagcgccttcgccacgaccaataggatggagctcgagggcgcgagttaccaggtgcccccgcagccgaacggcatgaccaacaacctccagggcagcaacacctatgccctggagaacactatgatcttcaacagccagccggcgaacccgggcaccaccgccacgtacctcgagggcaacatgctcatcaccagcgagagcgagacgcagccggtgaaccgcgtggcgtacaacgtcggcgggcagatggccaccaacaaccagagctccaccactgcccccgcgaccggcacgtacaacctccaggaaatcgtgcccggcagcgtgtggatggagagggacgtgtacctccaaggacccatctgggccaagatcccagagacgggggcgcactttcacccctctccggccatgggcggattcggactcaaacacccaccgcccatgatgctcatcaagaacacgcctgtgcccggaaatatcaccagcttctcggacgtgcccgtcagcagcttcatcacccagtacagcaccgggcaggtcaccgtggagatggagtgggagctcaagaaggaaaactccaagaggtggaacccagagatccagtacacaaacaactacaacgacccccagtttgtggactttgccccggacagcaccggggaatacagaaccaccagacctatcggaacccgataccttacccgacccctttaa

SEQ ID NO: 808 - DNA, 2175 bp, Artificial Sequence
  source: /note="Description of Artificial Sequence: Synthetic polynucleotide"
atgtcttttgttgatcaccctccagattggttggaagaagttggtgaaggtcttcgcgagtttttgggccttgaagcgggcccaccgaaaccaaaacccaatcagcagcatcaagatcaagcccgtggtcttgtgctgcctggttataactatctcggacccggaaacggtctcgatcgaggagagcctgtcaacagggcagacgaggtcgcgcgagagcacgacatctcgtacaacgagcagcttgaggcgggagacaacccctacctcaagtacaaccacgcggacgccgagtttcaggagaagctcgccgacgacacatccttcgggggaaacctcggaaaggcagtctttcaggccaagaaaagggttctcgaaccttttggcctggttgaagagggtgctaagacggcccctaccggaaagcggatagacgaccactttccaaaaagaaagaaggcccggaccgaagaggactccaagccttccacctcgtcagacgccgaagctggacccagcggatcccagcagctgcaaatcccagcccaaccagcctcaagtttgggagctgatacaatgtctgcgggaggtggcggcccattgggcgacaataaccaaggtgccgatggagtgggcaatgcctcgggagattggcattgcgattccacgtggatgggggacagagtcgtcaccaagtccacccgaacctgggtgctgcccagctacaacaaccaccagtaccgagagatcaaaagcggctccgtcgacggaagcaacgccaacgcctactttggatacagcaccccctgggggtactttgactttaaccgcttccacagccactggagcccccgagactggcaaagactcatcaacaactactggggcttcagaccccggtccctcagagtcaaaatcttcaacattcaagtcaaagaggtcacggtgcaggactccaccaccaccatcgccaacaacctcacctccaccgtccaagtgtttacggacgacgactaccagctgccctacgtcgtcggcaacgggaccgagggatgcctgccggccttccctccgcaggtctttacgctgccgcagtacggttacgcgacgctgaaccgcgacaacacagaaaatcccaccgagaggagcagcttcttctgcctagagtactttcccagcaagatgctgagaacgggcaacaactttgagtttacctacaactttgaggaggtgcccttccactccagcttcgctcccagtcagaacctcttcaagctggccaacccgctggtggaccagtacttgtaccgcttcgtgagcacaaataacactggcggagtccagttcaacaagaacctggccgggagatacgccaacacccacaaaaactggttcccggggcccatgggccgaacccagggctggaacctgggctccggggtcaaccgcgccagtgtcagcgccttcgccacgaccaataggatggagctcgagggcgcgagttaccaggtgcccccgcagtcgaacggcatgaccaacaacctccggggcagcaacacctatgccctggagaacactatgatcttcaacagccagccggcgaacccgggcaccaccgccacgtacctcgagggcaacatgctcatcaccagcgagagcgagacgcagccggtgaaccgcgtggcgtacaacgtcggcgggcagatggccaccaacaaccagagctccaccactgcccccgcgaccggcacgtacaacctccaggaaatcgtgcccggcagcgtgtggatggagagggacgtgtacctccaaggacccatctgggccaagatcccagagacgggggcgcactttcacccctctccggccatgggcggattcggactcaaacacccaccgcccatgatgctcatcaagaacacgcctgtgcccggaaatatcaccagcttctcggacgtgcccgtcagcagcttcatcacccagtacagcaccgggcaggtcaccgtggagatggagtgggagctcaagaaggaaaactccaagaggtggaacccagagatccagtacacaaacaactacaacgacccccagtttgtggactttgccccggacagcaccggggaatacagaaccaccagacctatcggaacccgataccttacccgacccctttaa

SEQ ID NO: 809 - DNA, 2175 bp, Artificial Sequence
  source: /note="Description of Artificial Sequence: Synthetic polynucleotide"
atgtcttttgttgatcaccctccagattggttggaagaagttggtgaaggtcttcgcgagtttttgggccttgaagcgggcccaccgaaaccaaaacccaatcagcagcatcaagatcaagcccgtggtcttgtgctgcctggttataactatctcggacccggaaacggtctcgatcgaggagagcctgtcaacagggcagacgaggtcgcgcgagagcacgacatctcgtacaacgagcagcttgaggcgggagacaacccctacctcaagtacaaccacgcggacgccgagtttcaggagaagctcgccgacgacacatccttcgggggaaacctcggaaaggcagtctttcaggccaagaaaagggttctcgaaccttttggcctggttgaagagggtgctaagacggcccctaccggaaagcggatagacgaccactttccaaaaagaaagaaggcccggaccgaagaggactccaagccttccacctcgtcagacgccgaagctggacccagcggatcccagcagctgcaaatcccagcccaaccagcctcaagtttgggagctgatacaatgtctgcgggaggtggcggcccattgggcgacaataaccaaggtgccgatggagtgggcaatgcctcgggagattggcattgcgattccacgtggatgggggacagagtcgtcaccaagtccacccgaacctgggtgctgcccagctacaacaaccaccagtaccgagagatcaaaagcggctccgtcgacggaagcaacgccaacgcctactttggatacagcaccccctgggggtactttgactttaaccgcttccacagccactggagcccccgagactggcaaagactcatcaacaactactggggcttcagaccccggtccctcagagtcaaaatcttcaacattcaagtcaaagaggtcacggtgcaggactccaccaccaccatcgccaacaacctcacctccaccgtccaagtgtttacggacgacgactaccagctgccctacgtcgtcggcaacgggaccgagggatgcctgccggccttccctccgcaggtctttacgctgccgcagtacggttacgcgacgctgaaccgcgacaacacagaaaatcccaccgagaggagcagcttcttctgcctagagtactttcccagcaagatgctgagaacgggcaacaactttgagtttacctacaactttgaggaggtgcccttccactccagcttcgctcccagtcagaacctcttcaagctggccaacccgctggtggaccagtacttgtaccgcttcgtgagcacaaataacactggcggagtccagttcaacaagaacctggccgggagatacgccaacacctacaaaaactggttcccggggcccatgggccgaacccagggctggaacctgggctccggggtcaaccgcgccagtgtcagcgccttcgccacgaccaataggatggagctcgagggcgcgagttaccaggtgcccccgcagccgaacggcatgaccaacaacctccagggcagcaacacctatgccctggagaacactatgatcttcaacagccagccggcgaacccgggcaccaccgccacgtacctcgagggcaacatgctcatcaccagcgagagcgagacgcagccggtgaaccgcgtggcgtacagcgtcggcgggcagatggccaccaacaaccagagctccaccactgcccccacgaccggcacgtacaacctccaggaaatcgtgcccggcagcgtgtggatggagagggacgtgtacctccaaggacccatctgggccaagatcccagagacgggggcgcactttcacccctctccggccatgggcggattcagactcaaacacccaccgcccatgatgctcatcaagaacacgcctgtgcccggaaatatcaccagcttctcggacgtgcccgtcagcagcttcatcacccagtacagcaccgggcaggtcaccgtggagatggagtgggagctcaagaaggaaaactccaagaggtggaacccagagatccagtacacaaacaactacaacgacccccagtttgtggactttgccccggacagcaccggggaatacagaaccaccagacctatcggaacccgataccttacccgacccctttaa

SEQ ID NO: 810 - DNA, 2175 bp, Artificial Sequence
  source: /note="Description of Artificial Sequence: Synthetic polynucleotide"
atgtcttttgttgatcaccctccagattggttggaagaagttggtgaaggtcttcgcgagtttttgggccttgaagcgggcccaccgaaaccaaaacccaatcagcagcatcaagatcaagcccgtggtcttgtgctgcctggttataactatctcggacccggaaacggtctcgatcgaggagagcctgtcaacagggcagacgaggtcgcgcgagagcacgacatctcgtacaacgagcagcttgaggcgggagacaacccctacctcaagtacaaccacgcggacgccgagtttcaggagaagctcgccgacgacacatccttcgggggaaacctcggaaaggcagtctttcaggccaagaaaagggttctcgaaccttttggcctggttgaagagggtgctaagacggcccctaccggaaagcggatagacgaccactttccaaaaagaaagaaggcccggaccgaagaggactccaagccttccacctcgtcagacgccgaagctggacccagcggatcccagcagctgcaaatcccagcccaaccagcctcaagtttgggagctgatacaatgtctgcgggaggtggcggcccattgggcgacaataaccaaggtgccgatggagtgggcaatgcctcgggagattggcattgcgattccacgtggatgggggacagagtcgtcaccaagtccacccgaacctgggtgctgcccagctacaacaaccaccagtaccgagagatcaaaagcggctccgtcgacggaagcaacgccaacgcctactttggatacagcaccccctgggggtactttgactttaaccgcttccacagccactggagcccccgagactggcaaagactcatcaacaactactggggcttcagaccccggtccctcagagtcaaaatcttcaacattcaagtcaaagaggtcacggtgcaggactccaccaccaccatcgccaacaacctcacctccaccgtccaagtgtttacggacgacgactaccagctgccctacgtcgtcggcaacgggaccgagggatgcctgccggccttccctccgcaggtctttacgctgccgcagtacggttacgcgacgctgaaccgcgacaacacagaaaatcccaccgagaggagcagcttcttctgcctagagtactttcccagcaagatgctgagaacgggcaacaactttgagtttacctacaactttgaggaggtgcccttccactccagcttcgctcccagtcagaacctcttcaagctggccaacccgctggtggaccagtacttgtaccgcttcgtgagcacaaataacactggcggagtccagttcaacaagaacctggccgggagatacgccaacacctacaaaaactggttcccggggcccatgggccgaacccagggctggaacctgggctccggggtcaaccgcgccagtgtcagcgccttcgccgcgaccaataggatggagctcgagggcgcgagttaccaggtgcccccgcagccgaacggcatgaccaacaacctccagggcagcaacacctatgccctggagaacactatgatcttcaacagccagccggcgaacccgggcaccaccgccacgtacctcgagggcaacatgctcatcaccagcgagagcgagacgcagccggtgaaccgcgtggcgtacaacgtcggcgggcagatggccaccaacaaccagagctccaccactgcccccgcgaccggcacgtacaacctccaggaaatcgtgcccggcggcgtgtggatggagagggacgtgtacctccaaggacccatctgggccaagatcccagagacgggggcgcactttcacccctctccggccatgggcggattcggactcaaacacccaccgcccatgatgctcatcaagaacacgcctgtgcccggaaataccaccagcttctcggacgtgcccgtcagcagcttcatcacccagtacagcaccgggcaggtcaccgtggagatggagtgggagctcaagaaggaaaactccaagaggtggaacccagagatccagtacacaaacaactacaacgacccccagtttgtggactttgccccggacagcaccggggaatacagaaccaccagacctatcggaacccgataccttacccgacccctttaa

SEQ ID NO: 811 - DNA, 2175 bp, Artificial Sequence
  source: /note="Description of Artificial Sequence: Synthetic polynucleotide"
atgtcttttgttgatcaccctccagattggttggaagaagttggtgaaggtcttcgcgagtttttgggccttgaagcgggcccaccgaaaccaaaacccaatcagcagcatcaagatcaagcccgtggtcttgtgctgcctggttataactatctcggacccggaaacggtctcgatcgaggagagcctgtcaacagggcagacgaggtcgcgcgagagcacgacatctcgtacaacgagcagcttgaggcgggagacaacccctacctcaagtacaaccacgcggacgccgagtttcaggagaagctcgccgacgacacatccttcgggggaaacctcggaaaggtagtctttcaggccaagaaaagggttctcgaaccttttggcctggttgaagagggtgctaagacggcccctaccggaaagcggatagacgaccactttccaaaaagaaagaaggcccggaccgaagaggactccaagccttccacctcgtcagacgccgaagctggacccagcggatcccagcagctgcaaatcccagcccaaccagcctcaagtttgggagctgatacaatgtctgcgggaggtggcggcccattgggcggcaataaccaaggtgccgatggagtgggcaatgcctcgggagattggcattgcgattccacgtggatgggggacagagtcgtcaccaagtccacccgaacctgggtgctgcccagctacaacaaccaccagtaccgagagatcaaaagcggctccgtcgacggaagcaacgccaacgcctactttggatacagcaccccctgggggtactttgactttaaccgcttccacagccactggggcccccgagactggcaaagactcatcaacaactactggggcttcagaccccggtccctcagagtcaaaatcttcaacattcaagtcaaagaggtcacggtgcaggactccaccaccaccatcgccaacaacctcacctccaccgtccaagtgtttacggacgacgactaccagctgccctacgtcgtcggcaacgggaccgagggatgcctgccggccttccctccgcaggtctttacgctgccgcagtacggttacgcgacgctgaaccgcgacaacacagaaaatcccaccgagaggagcagcttcttctgcctagagtactttcccagcaagatgctgagaacgggcaacaactttgagtttacctacaactttgaggaggtgcccttccactccagcttcgctcccagtcagaacctcttcaagctggccaacccgctggtggaccagtacttgtaccgcttcgtgagcacaaataacactggcggagtccagttcaacaagaacctggccgggagatacgccaacacctacaaaaactggttcccggggcccatgggccgaacccagggctggaacctgggctccggggtcaaccgcgccagtgtcagcgccctcgccacgaccaataggatggagctcgagggcgcgagttaccaggtgcccccgcagccgaacggcatgaccaacaacctccagggcagcaacacctatgccctggagaacactatgatcttcaacagccagccggcgaacccgggcaccaccgccacgtacctcgagggcaacatgctcatcaccagcgagagcgagacgcagccggtgaaccgcgtggcgtacaacgtcggcgggcagatggccaccaacaaccagagctccaccactgcccccgcgaccggcacgtacaacctccaggaaatcgtgcccggcagcgtgtggatggagagggacgtgtacctccaaggacccatctgggccaagatcccagagacgggggcgcactttcacccctctccggccatgggcggattcggactcaaacacccaccgcccatgatgctcatcaagaacacgcctgtgcccggaaatatcaccagcttctcggacgtgcccgtcagcagcttcatcacccagtacagcaccgggcaggtcaccgtggagatggagtgggagctcaagaaggaaaactccaagaggtggaacccagagatccagtacacaaacaactacaacgacccccagtttgtggactttgccccggacagcaccggggaatacagaaccaccagacctatcggaacccgataccttacccgacccctttaa

SEQ ID NO: 812 - DNA, 2175 bp, Artificial Sequence
  source: /note="Description of Artificial Sequence: Synthetic polynucleotide"
atgtcttttgttgatcaccctccagattggttggaagaagttggtgaaggtcttcgcgagtttttgggccttgaagcgggcccaccgaaaccaaaacccaatcagcagcatcaagatcaagcccgtggtcttgtgctgcctggttataactatctcggacccggaaacggtctcgatcgaggagagcctgtcaacagggcagacgaggtcgcgcgagagcacgacatctcgtacaacgagcagcttgaggcgggagacaacccctacctcaagtacaaccacgcggacgccgagtttcaggagaagctcgccgacgacacatccttcgggggaaacctcggaaaggcagtctttcaggccaagaaaagggttctcgaaccttttggcctggttgaagagggtgctaagacggcccctaccggaaagcggatagacgaccactttccaaaaagaaagaaggcccggaccgaagaggactccaagccttccacctcgtcagacgccgaagctggacccagcggatcccagcagctgcaaatcccagcccaaccagcctcaagtttgggagctgatacaatgtctgcgggaggtggcggcccattgggcgacaataaccaaggtgccgatggagtgggcaatgcctcgggagattggcattgcgattccacgtggatgggggacagagtcgtcaccaagtccacccgaacctgggtgctgcccagctacaacaaccaccagtaccgagagatcaaaagcggctccgtcgacggaagcaacgccaacgcctactttggatacagcaccccctgggggtactttgactttaaccgcttccacagccactggagcccccgagactggcaaagactcatcaacaactactggggcttcagaccccggtccctcagagtcaaaatcttcaacattcaagtcaaagaggtcacggtgcaggactccaccaccaccatcgccaacaacctcacctccaccgtccaagtgtttacggacgacgactaccagctgccctacgtcgtcggcaacgggaccgagggatgcctgccggccttccctccgcaggtctttacgctgccgcagtacggttacgcgacgctgaaccgcgacaacacagaaaatcccaccgagaggagcagcttcttctgcctagagtactttcccagcaagatgctgagaacgggcaacaactttgagtttacctacaactttgaggaggtgcccttccactccagcttcgctcccagtcagaacctcttcaagctggccaacccgctggtggaccagtacttgtaccgcttcgtgagcacaaataacactggcggagtccagttcaacaagaacctggccgggagatacgccaacacctacaaaaactggttcccggggcccatgggccgaacccagggctggaacctgggctccggggtcaaccgcgccagtgtcagcgccttcgccacgaccaataggatggagctcgagggcgcgagttaccaggtgcccccgcagccgaacggcatgaccaacaacctccagggcagcaacacctatgccctggagaacactatgatcttcaacagccagccggcgaacccgggcaccaccgccacgtacctcgagggcaacatgctcatcaccagcgagagcgagacgcagccggtgaaccgcgtggcgtacaacgtcggcgggcagatggccaccaacaaccagagctccaccactgcccccgcgaccggcacgtacaacctccaggaaatcgtgcccggcagcgtgtggatggagagggacgtgtacctccaaggacccatctgagccaagatcccagagacgggggcgcactttcacccctctccggccatgggcggattcggactcaaacacccaccgcccatgatgctcatcaagaacacgcctgtgcccggaaatatcaccagcttctcggacgtgcccgtcagcagcttcatcacccagtacagcaccgggcaggtcaccgtggagatggagtgggagctcaagaaggaaaactccaagaggtggaacccagagatccagtacacaaacaactacaacgacccccagtttgtggactttgccccggacagcaccggggaatgcagaaccaccagacctatcggaacccgataccttacccgacccctttaa

SEQ ID NO: 813 - DNA, 2175 bp, Artificial Sequence
  source: /note="Description of Artificial Sequence: Synthetic polynucleotide"
atgtcttttgttgatcaccctccagattggttggaagaagttggtgaaggtcttcgcgagtttttgggccttgaagcgggcccaccgaaaccaaaacccaatcagcagcatcaagatcaagcccgtggtcttgtgctgcctggttataactatctcggacccggaaacggtctcgatcgaggagagcctgtcaacagggcagacgaggtcgcgcgagagcacgacatctcgtacaacgagcagcttgaggcgggagacaacccctacctcaagtacaaccacgcggacgccgagtttcaggagaagctcgccgacgacacatccttcgggggaaacctcggaaaggcagtctttcaggccaagaaaagggttctcgaaccttttggcctggttgaagagggtgctaagacggcccctaccggaaagcggatagacgaccactttccaaaaagaaagaaggcccggaccgaagaggactccaagccttccacctcgtcagacgccgaagctggacccagcggatcccagcagctgcaaatcccagcccaaccagcctcaagtttgggagctgatacaatgtctgcgggaggtggcggcccattgggcgacaataaccaaggtgccgatggagtgggcaatgcctcgggagattggcattgcgattccacgtggatgggggacagagtcgtcaccaagtccacccgaacctgggtgctgcccagctacaacaaccaccagtaccgagagatcaaaagcggctccgtcgacggaagcaacgccaacgcctactttggatacagcaccccctgggggtactttgactttaaccgcttccacagccactggagcccccgagactggcaaagactcatcaacaactactggggcttcagaccccggtccctcagagtcaaaatcctcaacattcaagtcaaagaggtcacggtgcaggactccaccaccaccatcgccaacaacctcacctccaccgtccaagtgtttacggacgacgactaccagctgccctacgtcgtcggcaacgggaccgagggatgcctgccggccttccctccgcaggtctttacgctgccgcagtacggttacgcgacgctgaaccgcgacaacacagaaaatcccaccgagaggagcagcttcttctgcctagagtactttcccagcaagatgctgagaacgggcaacaactttgagtttacctacaactttgaggaggtgcccttccactccagcttcgctcccagtcagaacctcttcaagctggccaacccgctggtgggccagtacttgtaccgcttcgtgagcacaaataacactggcggagtccagttcaacgagaacctggccgggagatacgccaacacctacaaaaactggttcccggggcccatgggccgaacccagggctggaacctgggctccggggtcaaccgcgccagtgtcagcgccttcgccacgaccaataggatggagctcgagggcgcgagttaccaggtgcccccgcagccgaacggcatgaccaacaacctccagggcagcaacacctatgccctggagaacactatgatcttcaacagccagccggcgaacccgggcaccaccgccacgtacctcgagggcaacatgctcatcaccagcgagagcgagacgcagccggtgaaccgcgtggcgtacaacgtcggcgggcagatggccaccaacaaccagagctccaccactgcccccgcgaccggcacgtacaacctccaggaaatcgtgcccggcagcgtgtggatggagagggacgtgtacctccaaggacccatctgggccaagatcccagagacgggggcgcactttcacccctctccggccatgggcggattcggactcaaacacccaccgcccatgatgctcatcaagaacacgcctgtgcccggaaatatcaccagcttctcggacgtgcccgtcagcagcttcatcacccagtacagcaccgggcaggccaccgtggagatggagtgggagctcaagaaggaaaactccaagaggtggaacccagagatccagtacacaaacaactacaacgacccccagtttgtggactttgccccggacagcaccggggaatacagaaccaccagacctatcggaacccgataccttacccgacccctttaa

SEQ ID NO: 814 - DNA, 2175 bp, Artificial Sequence
  source: /note="Description of Artificial Sequence: Synthetic polynucleotide"
atgtcttttgttgatcaccctccagattggttggaagaagttggtgaaggtcttcgcgagtttttgggccttgaagcgggcccaccgaaaccaaaacccaatcagcagcatcaagatcaagcccgtggtcttgtgctgcctggttataactatctcggacccggaaacggcctcgatcgaggagagcctgtcaacagggcagacgaggtcgcgcgagagcacgacatctcgtacaacgagcagcttgaggcgggagacaacccctacctcaagtacaaccacgcggacgccgagtttcaggagaagctcgccgacgacacatccttcgggggaaacctcggaaaggcagtctttcaggccaagaaaagggttctcgaaccttttggcctggttgaagagggtgctaagacggcccctaccggaaagcggatagacgaccactttccaaaaagaaagaaggcccggaccgaagaggactccaagccttccacctcgtcagacgccgaagctggacccagcggatcccagcagctgcaaatcccagcccaaccagcctcaagtttgggagctgatacaatgtctgcgggaggtggcggcccattgggcgacaataaccaaggtgccgatggagtgggcaatgcctcgggagattggcattgcgattccacgtggatgggggacagagtcgtcaccaagtccacccgaacctgggtgctgcccagctacaacaaccaccagtaccgagagatcaaaagcggctccgtcgacggaagcaacgccaacgcctactttggatacagcaccccctgggggtactttgactttaaccgcttccacagccactggagcccccgagactggcaaagactcatcaacaactactggggcttcagaccccggtccctcagagtcaaaatcttcaacattcaagtcaaagaggtcacggtgcaggactccaccaccatcatcgccaacaacctcacctccaccgtccaagtgtttacggacgacgactaccagctgccctacgtcgtcggcaacgggaccgagggatgcctgccggccttccctccgcaggtctttacgctgccgcagtacggttacgcgacgctgaaccgcgacaacacagaaaatcccaccgagaggagcagcttcttctgcctagagtactttcccagcaagatgctgagaacgggcaacaactttgagtttacctacaactttgaggaggtgcccttccactccagcttcgcccccagtcagaacctcttcaagctggccaacccgctggtggaccagtacttgtaccgcttcgtgagcacaaataacactggcggagtccagttcaacaagaacctggccgggagatacgccaacacctacaaaaactggttcccggggcccatgggccgaacccagggctggaacctgggctccggggtcaaccgcgccagtgtcagcgccttcgccacgaccaataggatggagctcgagggcgcgagttaccaggtgcccccgcagccgaacggcatgaccaacaacctccagggcagcaacacctatgccctggagaacactatgatcttcaacagccagccggcgaacccgggcaccaccgccacgtacctcgagggcaacatgctcatcaccagcgagagcgagacgcagccggtgaaccgcgtggcgtacaacgtcggcgggcagatggccaccaacaaccagagctccaccactgcccccgcgaccggcacgtacaacctccaggaaatcgtgcccggcagcgtgtggatggagagggacgtgtacctccaaggacccatctgggccaagatcccagagacgggggcgcactttcacccctctccggccatgggcggattcggactcaaacacccaccgcccatgatgctcatcaagaacacgcctgtgcccggaaatatcaccagcttctcggacgtgcccgtcagcagcttcatcacccagtacagcaccgggcaggtcaccgtggagatggagtgggagctcaagaaggaaaactccaagaggtggaacccagagatccagtacacaaacaactacaacgacccccagtttgtggactttgccccggacagcaccggggaatacagaaccaccagacctatcggaacccgataccttacccgacccctttaa

SEQ ID NO: 815 - DNA, 2175 bp, Artificial Sequence
  source: /note="Description of Artificial Sequence: Synthetic polynucleotide"
atgtcttttgttgatcaccctccagattggttggaagaagttggtgaaggtcttcgcgagtttttgggccttgaagcgggcccaccgaaaccaaaacccaatcagcagcatcaagatcaagcccgtggtcttgtgctgcctggttataactatctcggacccggaaacggtctcgatcgaggagagcctgtcaacagggcagacgaggtcgcgcgagagcacgacatctcgtacaacgagcagcttgaggcgggagacaacccctacctcaagtacaaccacgcggacgccgagtttcaggagaagctcgccgacgacacatccttcgggggaaacctcggaaaggcagtctttcaggccaagaaaagggttctcgaaccttttggcctggttgaagagggtgctaagacggcccctaccggaaagcggatagacgaccactttccaaaaagaaagaaggcccggaccgaagaggactccaagccttccacctcgtcagacgccgaagctggacccagcggatcccagcagctgcaaatcccagcccaaccagcctcaagtttgggagctgatacaatgtctgcgggaggtggcggcccattgggcgacaataaccaaggtgccgatggagtgggcaatgcctcgggagattggcattgcgattccacgtggatgggggacagagtcgtcaccaagtccacccgaacctgggtgctgcccagctacaacaaccaccagtaccgagagatcaaaagcggctccgtcgacggaagcaacgccaacgcctactttggatacagcaccccctgggggtactttgactttaaccgcttccacagccactggagcccccgagactggcaaagactcatcaacaactactggggcttcagaccccggtccctcagagtcaaaatcttcaacattcaagtcaaagaggtcacggtgcaggactccaccaccaccatcgccaacaacctcacctccaccgtccaagtgtttacggacgacgactaccagctgccctacgtcgtcggcaacgggaccgagggatgcctgccggccttccctccgcaggtctttacgctgccgcagtacggttacgcgacgctgaaccgcgacaacacagaaaatcccaccgagaggagcagcttcttctgcctagagtactttcccagcaagatgctgagaacgggcaacaactttgagtttacctacaactttgaggaggtgcccttccactccagcttcgctcccagtcagaacctcttcaagctggccaacccgctggtggaccagtacttgtaccgcttcgtgagcacaaataacactggcggagtccagttcaacaagaacctggccgggagatacgccaacacctacaaaaactggttcccggggcccatgggccgaacccagggctggaacctgggctccggggtcaaccgcgccagtgtcagcgccttcgccacgaccaataggatggagctcgagggcgcgagttaccaggtgcccccgcagccgaacggcatgaccaacaacctccagggcagcaacacctatgccctggagaacactatgatcttcaacagccagccggcgaacccgggcaccaccgccacgtacctcgagggcaacatgctcatcaccagcgagagcgagacgcagccggtgaaccgcgtggcgtacaacgtcggcgggcagatggccaccaacaaccagagctccaccactgcccccgcgaccggcacgtacaacctccaggaaatcgtgcccggcagcgtgtggatggagagggacgtgtacctccaaggacccatctgggccaagatcccagagacgggggcgcactttcacccctctccggccatgggcggattcggactcaaacacccaccgcccatgatgctcatcaagaacacgcctgtgcccggaaatatcaccagcctctcggacgtgcccgtcagcagcttcatcacccagtacagcaccgggcaggtcaccgtggagatggagtgggagctcaagaaggaaaactccaagaggtggaacccagagatccagtacacaaacaactacaacgacccccagtttgtggactttgccccggacagcaccggggaatacagaaccaccagacctatcggaacccgataccttacccgacccctttaa

SEQ ID NO: 816 - DNA, 2175 bp, Artificial Sequence
  source: /note="Description of Artificial Sequence: Synthetic polynucleotide"
atgtcttttgttgatcaccctccagattggttggaagaagttggtgaaggtcttcgcgagtttttgggccttgaagcgggcccaccgaaaccaaaacccaatcagcagcatcaagatcaagcccgtggtcttgtgctgcctggttataactatctcggacccggaaacggtctcgatcgaggagagcctgccaacagggcagacgaggtcgcgcgagagcacgacatctcgtacaacgagcagcttgaggcgggagacaacccctacctcaagtacaaccacgcgggcgccgagtttcaggagaagctcgccgacgacacatccttcgggggaaacctcggaaaggcagtctttcaggccaagaaaagggttctcgaaccttttggcctggttgaagagggtgctaagacggcccctaccggaaagcggatagacgaccactttccaaaaagaaagaaggcccggaccgaagaggactccaagccttccacctcgtcagacgccgaagctggacccagcggatcccagcagctgcaaatcccagcccaaccagcctcaagtttgggagctgatacaatgtctgcgggaggtggcggcccattgggcgacaataaccaaggtgccgatggagtgggcaatgcctcgggagattggcattgcgattccacgtggatgggggacagagtcgtcaccaagtccacccgaacctgggtgctgcccggctacaacaaccaccagtaccgagagatcaaaagcggctccgtcgacggaagcaacgccaacgcctactttggatacagcaccccctgggggtactttgactttaaccgcttccacagccactggagcccccgagactggcaaagactcatcaacaactactggggcttcagaccccggtccctcagagtcaaaatcttcaacattcaagtcaaagaggtcacggtgcaggactccaccaccaccatcgccaacaacctcacctccaccgtccaagtgtttacggacgacgactaccagctgccctacgtcgtcggcaacgggaccgagggatgcctgccggccttccctccgcaggtctttacgctgccgcagtacggttacgcgacgctgaaccgcgacaacacagaaaatcccaccgagaggagcagcttcttctgcctagagtactttcccagcaagatgctgagaacgggcaacaactttgagtttacctacaactttgaggaggtgcccttccactccagcttcgctcccagtcagaacctcttcaagctggccaacccgctggtggaccagtacttgtaccgcttcgtgagcacaaataatactggcggagtccagttcaacaagaacctggccgggagatacgccaacacctacaaaaactggttcccggggcccatgggccgaacccagggctggaacctgggctccggggtcaaccgcgccagtgtcagcgccttcgccacgaccaataggatggagctcgagggcgcgagttaccaggtgcccccgcagccgaacggcatgaccaacaacctccagggcagcaacacctatgccctggagaacactatgatcttcaacagccagccggcgaacccgggcaccaccgccacgtacctcgagggcaacatgctcatcaccagcgagagcgagacgcagccggtgaaccgcgtggcgtacaacgtcggcgggcagatggccaccaacaaccagagctccaccactgcccccgcgaccggcacgtacaacctccaggaaatcgtgcccggcagcgtgtggatggagagggacgtgtacctccaaggacccatctgggccaagatcccagagacgggggcgcactttcacccctctccggccatgggcggattcggactcaaacacccaccgcccatgatgctcatcaagaacacgcctgtgcccggaaatatcaccagcttctcggacgtgcccgtcagcagcttcatcacccagtacagcaccgggcaggtcaccgtggagatggagtgggagctcaagaaggaaaactccaagaggtggaacccagagatccagtacacaaacaactacaacgacccccagtttgtggactttgccccggacagcaccggggaatacagaaccaccagacctatcggaacccgataccttacccgacccctttaa

SEQ ID NO: 817 - DNA, 2175 bp, Artificial Sequence
  source: /note="Description of Artificial Sequence: Synthetic polynucleotide"
atgtcttttgttgatcaccctccagattggttggaagaagttggtgaaggtcttcgcgagtttttgggccttgaagcgggcccaccgaaaccaaaacccaatcagcagcatcaagatcaagcccgtggtcttgtgctgcctggttataactatctcggacccggaaacggtctcgatcgaggagagcctgtcaacagggcagacgaggtcgcgcgagagcacgacatctcgtacaacgagcagcttgaggcgggagacaacccctacctcaagtacaaccacgcggacgccgagtttcaggagaagctcgccgacgacacatccttcgggggaaacctcggaaaggcagtctttcaggccaagaaaagggttctcgaaccttttggcctggttgaagagggtgctaagacggcccctaccggaaagcggatagacgaccactttccaaaaagaaagaaggcccggaccgaagaggactccaagcctcccacctcgtcagacgccgaagctggacccagcggatcccagcagctgcaaatcccagcccaaccagcctcaagtttgggagctgatacaatgtctgcgggaggtggcggcccattgggcgacaataaccaaggtgccgatggagtgggcaatgcctcgggagattggcattgcgattccacgtggatgggggacagagtcgtcaccaagtccacccgaacctgggtgctgcccagctacaacaaccaccagtaccgagagatcaaaagcggctccgtcgacggaagcaacgccaacgcctactttggatacagcaccccctgggggtactttgactttaaccgcttccacagccactggagcccccgagactggcaaagactcatcaacaactactggggcttcagaccccggtccctcagagtcaaaatcttcaacattcaagtcaaagaggtcacggtgcaggactccgccaccaccatcgccaacaacctcacctccaccgtccaagtgtttacggacgacgactaccagctgccctacgtcgtcggcaacgggaccgagggatgcctgccggccttccctccgcaggtctttacgctgccgcagtacggttacgcgacgctgaaccgcgacaacacagaaaatcccaccgagaggagcagcttcttctgcctagagtactttcccagcaagatgctgagaacgggcaacaactttgagtttacctacaactttgaggaggtgcccttccactccagcttcgctcccagtcagaacctcttcaagctggccaacccgctggtggaccagtacttgtaccgcttcgtgagcacaaataacactggcggagtccagttcaacaagaacctggccgggagatacgccaacacctacaaaaactggttcccggggcccatgggccgaacccagggctggaacctgggctccggggtcaaccgcgccagtgtcagcgccttcgccacgaccaataggatggagctcgagggcgcgagttaccaggtgcccccgcagccgaacggcatgaccaacaacctccagggcagcaacacctatgccctggagaacactatgatcttcaacagccagccggcgaacccgggcaccaccgccacgtacctcgagggcaacatgctcatcaccagcgagagcgagacgcagccggtgaaccgcgtggcgtacaacgtcggcgggcagatggccaccaacaaccagagctccaccactgcccccgcgaccggcacgtacaacctccaggaaatcgtgcccggcagcgtgtggatggagagggacgtgtacctccaaggacccatctgggccaagatcccagagacgggggcgcactttcacccctctccggccatgggcggattcggactcaaacacccaccgcccatgatgctcatcaagaacacgcctgtgcccggaaatatcaccagcttctcggacgtgcccgtcagcagcttcatcacccagtacagcaccgggcaggtcaccgtggagatggagtgggagctcaagaaggaaaactccaagaggtggaacccagagatccagtacacaaacaactacaacgacccccagtttgtggactttgccccggacagcaccggggaatacagaaccaccagacctatcggaacccgataccttacccgacccctttaa

SEQ ID NO: 818 - DNA, 2175 bp, Artificial Sequence
  source: /note="Description of Artificial Sequence: Synthetic polynucleotide"
atgtcttttgttgatcaccctccagattggttggaagaagttggtgaaggtcttcgcgagtttttgggccttgaagcgggcccaccgaaaccaaaacccaatcagcagcatcaagatcaagcccgtggtcttgtgctgcctggttataactatctcggacccggaaacggtctcgatcgaggagagcctgtcaacagggcagacgaggtcgcgcgagagcacgacatctcgtacaacgagcagcttgaggcgggagacaacccctacctcaagtacaaccacgcggacgccgagtttcaggagaagctcgccgacgacacatccttcgggggaaacctcggaaaggcagtctttcaggccaagaaaagggttctcgaaccttttggcctggttgaagagggtgctaagacggcccctaccggaaagcggatagacgaccactttccaaaaagaaagaaggcccggaccgaagaggactccaagccttccacctcgtcagacgccgaagctggacccagcggatcccagcagccgcaaatcccagcccaaccagcctcaagtttgggagctgatacaatgtctgcgggaggtggcggcccattgggcgacaataaccaaggtgccgatggagtgggcaatgcctcgggagattggcattgcgattccacgtggatgggggacagagtcgtcaccaagtccacccgaacctgggtgctgcccagctacaacaaccaccagtaccgagagatcaaaagcggctccgtcgacggaagcaacgccaacgcctactttggatacagcaccccctgggggtactttgactttaaccgcttccacagccactggagcccccgagactggcaaagactcatcaacaactactggggcttcagaccccggtccctcagagtcaaaatcttcaacattcaagtcaaagaggtcacggtgcaggactccaccaccaccatcgccaacaacctcacctccaccgtccaagtgtttacggacgacgactaccagctgccctacgtcgtcggcaacgggaccgagggatgcctgccggccttccctccgcaggtctttacgctgccgcagtacggttacgcgacgctgaaccgcgacaacacagaaaatcccaccgagaggagcagcttcttctgcctagagtactttcccagcaagatgctgagaacgggcaacaactttgagtttacctacaactttgaggaggtgcccttccactccagcttcgctcccagtcagaacctcttcaagctggccaacccgctggtggaccagtacttgtaccgcttcgtgagcacaaataacactggcggagtccagttcaacaagaacctggccgggagatacgccaacacctacaaaaactggttcccggggcccatgggccgaacccagggctggaacctgggctccggggtcaaccgcgccagtgtcagcgccttcgccacgaccaataggatggagctcgagggcgcgagttaccaggtgcccccgcagccgaacggcatgaccaacaacctccagggcagcaacacctatgccctggagaacactatgatcttcaacagccagccggcgaacccgggcaccaccgccacgtacctcgagggcaacatgctcatcaccagcgagagcgagacgcagccggtgaaccgcgtggcgtacaacgtcggcgggcagatggccaccaacaaccagagctccaccactgcccccgcgaccggcacgtacaacctccaggaaatcgtgcccggcagcgtgtggatggagagggacgtgtacctccaaggacccatctgggccaagatcccagagacgggggcgcactttcacccctctccggccatgggcggattcggactcaaacacccaccgcccatgatgctcatcaagaacacgcctgcgcccggaaatatcaccagcttctcggacgtgcccgtcagcagcttcatcacccagtacagcaccgggcaggtcaccgtggagatggagtgggagctcaagaaggaaaactccaagaggtggaacccagagatccagtacacaaacaactacaacgacccccagtttgtggactttgccccggacagcaccggggaatacagaaccaccagacctatcggaacccgataccttacccgacccctttaa

SEQ ID NO: 819 - DNA, 2175 bp, Artificial Sequence
  source: /note="Description of Artificial Sequence: Synthetic polynucleotide"
atgtcttttgttgatcaccctccagattggttggaagaagttggtgaaggtcttcgcgagtttttgggccttgaagcgggcccaccgaaaccaaaacccaatcagcagcatcaagatcaagcccgtggtcttgtgctgcctggttataactatctcggacccggaaacggtctcgatcgaggagagcctgtcaacagggcagacgaggtcgcgcgagagcacgacatctcgtacaacgagcagcttgaggcgggagacaacccctacctcaagtacaaccacgcggacgccgagtttcaggagaagctcgccgacgacacatccttcgggggaaacctcggaaaggcagtctttcaggccaagaaaagggttctcgaaccttttggcctggttgaagagggtgctaagacggcccctaccggaaagcggatagacgaccactttccaaaaagaaagaaggcccggaccgaagaggactccaagcctcccacctcgtcagacgccgaagctggacccagcggatcccagcagctgcaaatcccagcccaaccagcctcaagtttgggagctgatacaatgtctgcgggaggtggcggcccattgggcgacaataaccaaggtgccgatggagtgggcaatgcctcgggagattggcattgcgattccacgtggatgggggacagagtcgtcaccaagtccacccgaacctgggtgctgcccagctacaacaaccaccagtaccgagagatcaaaagcggctccgtcgacggaagcaacgccaacgcctactttggatacagcaccccctgggggtactttgactttaaccgcttccacagccactggagcccccgagactggcaaagactcatcaacaactactggggcttcagaccccggtccctcagagtcaaaatcttcaacattcaagtcaaagaggtcacggtgcaggactccaccaccaccatcgccaacaacctcacctccaccgtccaagtgtttacggacgacgactaccagctgccctacgtcgtcggcaacgggaccgagggatgcctgccggccttccctccgcaggtctttacgctgccgcagtacggttacgcgacgctgaaccgcgacaacacagaaaatcccaccgagaggagcagcttcttctgcctagagtactttcccagcaagatgctgagaacgggcaacaactttgagtttacctacaactttgaggaggtgcccttccactccagcttcgctcccagtcagaacctcttcaagctggccaacccgctggtggaccagtacttgtaccgcttcgtgagcacaaataacactggcggagtccagttcaacaagaacctggccgggagatacgccaacacctacaaaaactggttcccggggcccatgggccgaacccagggctggaacctgggctccggggtcaaccgcgccagtgtcagcgccttcgccacgaccaataggatggagctcgagggcgcgagttaccaggtgcccccgcagccgaacggcatgaccaacaacctccagggcagcaacacctatgccctggagaacactatgatcttcaacagccagccggcgaacccgggcaccaccgccacgtacctcgagggcaacatgctcatcaccagcgagagcgagacgcagccggtgaaccgcgtggcgtacaacgtcggcgggcagatggccaccaacaaccagagctccaccactgcccccgcgaccggcacgtacaacctccaggaaatcgtgcccggcagcgtgtggatggagagggacgtgtacctccaaggacccatctgggccaagatcccagagacgggggcgcactttcacccctctccggccatgggcggattcggactcaaacacccaccgcccatgatgctcatcaagaacacgcctgtgcccggaaatatcaccagcttctcggacgtgcccgtcagcagcttcatcacccagtacagcaccgggcaggtcaccgtggagatggagtgggagctcaagaaggaaaactccaagaggtggaacccagagatccagtacacaaacaactacaacgacccccagtttgtggactttgccccggacagcaccggggaatacagaaccaccagacctatcggaacccgataccttacccgacccctttaa

SEQ ID NO: 820 - DNA, 2175 bp, Artificial Sequence
  source: /note="Description of Artificial Sequence: Synthetic polynucleotide"
atgtcttttgttgatcaccctccagattggttggaagaagttggtgaaggtcttcgcgagtttttgggccttgaagcgggcccaccgaaaccaaaacccaatcagcagcatcaagatcaagcccgtggtcttgtgctgcctggttataactatctcggacccggaaacggtctcgatcgaggagagcctgtcaacagggcagacgaggtcgcgcgagagcacgacatctcgtacaacgagcagcttgaggcgggagacaacccctacctcaagtacaaccacgcggacgccgagtttcaggagaagctcgccgacgacacatccttcgggggaaacctcggaaaggcagtctttcaggccaagaaaagggttctcgaaccttttggcctggttgaagagggtgctaagacggcccctaccggaaagcggatagacgaccactttccaaaaagaaagaaggcccggaccgaagaggactccaagcctcccacctcgtcagacgccgaagctggacccagcggatcccagcagctgcaaatcccagcccaaccagcctcaagtttgggagctgatacaatgtctgcgggaggtggcggcccattgggcgacaataaccaaggtgccgatggagtgggcaatgcctcgggagattggcattgcgattccacgtggatgggggacagagtcgtcaccaagtccacccgaacctgggtgccgcccagctacaacaaccaccagtaccgagagatcaaaagcggctccgtcgacggaagcaacgccaacgcctactttggatacagcaccccctgggggtactttgactttaaccgcttccacagccactggagcccccgagactggcaaagactcatcaacaactactggggcttcagaccccggtccctcagagtcaaaatcttcaacattcaagtcaaagaggtcacggtgcaggactccaccaccaccatcgccaacaacctcacctccaccgtccaagtgtttacggacgacgactaccagctgccctacgtcgtcggcaacgggaccgagggatgcctgccggccttccctccgcaggtctttacgctgccgcagtacggttacgcgacgctgaaccgcgacaacacagaaaatcccaccgagaggagcagcttcttctgcctagagtactttcccagcaagatgctgagaacgggcaacaactttgagtttacctacaactttgaggaggtgcccttccactccagcttcgctcccagtcagaacctcttcaagctggccaacccgctggtggaccagtacttgtaccgcttcgtgagcacaaataacactggcggagtccagttcaacaagaacctggccgggagatacgccaacacctacaaaaactggttcccggggcccatgggccgaacccagggctggaacctgggctccggggtcaaccgcgccagtgtcagcgccttcgccacgaccaataggatggagctcgagggcgcgagttaccaggtgcccccgcagccgaacggcatgaccaacaacctccagggcagcaacacctatgccctggagaacactatgatcttcaacagccagccggcgaacccgggcaccaccgccacgtacctcgagggcaacatgctcatcaccagcgagagcgagacgcagccggtgaaccgcgtggcgtacaacgtcggcgggcagatggccaccaacaaccagagctccaccactgcccccgcgaccggcacgtacaacctccaggaaatcgtgcccggcagcgtgtggatggagagggacgtgtacctccaaggacccatctgggccaagatcccagagacgggggcgcactttcacccctctccggccatgggcggattcggactcaaacacccaccgcccatgatgctcatcaagaacacgcctgtgcccggaaatatcaccagcttctcggacgtgcccgtcagcagcttcatcacccagtacagcaccgggcaggtcgccgtggagatggagtgggagctcaagaaggaaaactccaagaggtggaacccagagatccagtacacaaacaactacaacgacccccagtttgtggactttgccccggacagcaccggggaatacagaaccaccagacctatcggaacccgataccttacccgacccctttaa

SEQ ID NO: 821 - DNA, 2175 bp, Artificial Sequence
  source: /note="Description of Artificial Sequence: Synthetic polynucleotide"
atgtcttttgttgatcaccctccagattggttggaagaagttggtgaaggtcttcgcgagtttttgggccttgaagcgggcccaccgaaaccaaaacccaatcagcagcatcaagatcaagcccgtggtcttgtgctgcctggttataactatctcggacccggaaacggtctcgatcgaggagagcctgtcaacagggcagacgaggtcgcgcgagagcacgacatctcgtacaacgagcagcttgaggcgggagacaacccctacctcaagtacaaccacgcggacgccgagtttcaggagaagctcgccgacgacacatccttcgggggaaacctcggaaaggcagtctttcaggccaagaaaagggttctcgaaccttttggcctggttgaagagggtgctaagacggcccctaccggaaagcggatagacgaccactttccaaaaagaaagaaggcccggaccgaagaggactccaagccttccacctcgtcagacgccgaagctggacccagcggatcccagcagctgcaaatcccagcccaaccagcctcaagtttgggagctgatacaatgtctgcgggaggtggcggcccattgggcgacaataaccaaggtgccgatggagtgggcaatgcctcgggagattggcattgcgattccacgtggatgggggacagagtcgtcaccaagtccacccgaacctgggtgctgcccagctacaacaaccaccagtaccgagagatcaaaagcggctccgtcgacggaagcaacgccaacgcctactttggatacagcaccccctgggggtactttgactttaaccgcttccacagccactggagcccccgagactggcaaagactcatcaacaactactggggcttcagaccccggtccctcagagtcaaaatcttcaacattcaagtcaaagaggtcacggtgcaggactccaccaccaccatcgccaacaacctcacctccaccgtccaagtgtttacggacgacgactaccagctgccctacgtcgtcggcaacgggaccgagggatgcctgccggccttccctccgcaggtctttacgctgccgcagtacggttacgcgacgctgaaccgcgacaacacagaaaatcccaccgagaggagcagcttcttctgcctagagtactttcccagcaagatgctgagaacgggcaacaactttgagtttacctacaactttgaggaggtgcccttccactccagcttcgctcccagtcagaacctcttcaagctggccaacccgctggtggaccagtacttgtaccgcttcgtgagcacaaataacactggcggagtccagttcaacaagaacctggccgggagatacgccaacacctacaaaaactggttcccggggcccatgggccgaacccagggctggaacctgggctccggggtcaaccgcgccagtgtcagcgccttcgccacgaccaataggatggagctcgagggcgcgagttaccaggtgcccccgcagccgaacggcatgaccaacaacctccagggcagcaacacctatgccctggagaacactatgatcttcaacagccagccggcgaacccgggcaccaccgccacgtacctcgagggcaacatgctcatcaccagcgagagcgagacgcagccggtgaaccgcgtggcgtacaacgtcggcgggcagatggccaccaacaaccagagctccaccactgcccccgcgaccggcacgtacaacctccaggaaatcgtgcccggcagcgtgtggatggagagggacgtgtacctccaaggacccatctgggccaagatcccagagacgggggcgcactttcacccctctccggccatgggcggattcggactcaaacacccaccgcccatgatgctcatcaagaacacgcctgcgcccggaaatatcaccagcttctcggacgtgcccgtcagcagcttcatcacccagtacagcaccgggcaggtcaccgtggagatggagtgggagctcaagaaggaaaactccaagaggtggaacccagagatccagtacacaaacaactacaacgacccccagtttgtggactttgccccggacagcaccggggaatacagaaccaccagacctatcggaacccgataccttacccgacccctttaa

SEQ ID NO: 822 - DNA, 2175 bp, Artificial Sequence
  source: /note="Description of Artificial Sequence: Synthetic polynucleotide"
atgtcttttgttgatcaccctccagattggttggaagaagttggtgaaggtcttcgcgagtttttgggccttgaagcgggcccaccgaaaccaaaacccaatcagcagcatcaagatcaagcccgtggtcttgtgctgcctggttataactatctcggacccggaaacggtctcgatcgaggagagcctgtcaacagggcagacgaggtcgcgcgagagcacgacatctcgtacaacgagcagcttgaggcgggagacaacccctacctcaagtacaaccacgcggacgccgagtttcaggagaagctcgccgacgacacatccttcgggggaaacctcggaaaggcagtctttcaggccaagaaaagggttctcgaaccttttggcctggctgaagagggtgctaagacggcccctaccggaaagcggatagacgaccactttccaaaaagaaagaaggcccggaccgaagaggactccaagccttccacctcgtcagacgccgaagctggacccagcggatcccagcagctgcaaatcccagcccaaccagcctcaagtttgggagctgatacaatgtctgcgggaggtggcggcccattgggcgacaataaccaaggtgccgatggagtgggcaatgcctcgggagattggcattgcgattccacgtggatgggggacagagtcgtcaccaagtccacccgaacctgggtgctgcccagctacaacaaccaccagtaccgagagatcaaaagcggctccgtcgacggaagcaacgccaacgcctactttggatacagcaccccctgggggtactttgactttaaccgcttccacagccactggagcccccgagactggcaaagactcatcaacaactactggggcttcagaccccggtccctcagagccaaaatcttcaacattcaagtcaaagaggtcacggtgcaggactccaccaccaccatcgccaacaacctcacctccaccgtccaagtgtttacggacgacgactaccagctgccctacgtcgtcggcaacgggaccgagggatgcctgccggccttccctccgcaggtctttacgctgccgcagtacggttacgcgacgctgaaccgcgacaacacagaaaatcccaccgagaggagcagcttcttctgcctagagtactttcccagcaagatgctgagaacgggcaacaaccttgagtttacctacaactttgaggaggtgcccttccactccagcttcgctcccagtcagaacctcttcaagctggccaacccgctggtggaccagtacttgtaccgcttcgtgagcacaaataacactggcggagtccagttcaacaagaacctggccgggagatacgccaacacctacaaaaactggttcccggggcccatgggccgaacccagggctggaacctgggctccggggtcaaccgcgccagtgtcagcgccttcgccacgaccaataggatggagctcgagggcgcgagttaccaggtgcccccgcagccgaacggcatgaccaacaacctccagggcagcaacacctatgccctggagaacactatgatcttcaacagccagccggcgaacccgggcaccaccgccacgtacctcgagggcaacatgctcatcaccagcgagagcgagacgcagccggtgaaccgcgtggtgcacaacgtcggcgggcagatggccaccaacaaccagagctccaccactgcccccgcgaccggcacgtacaacctccaggaaatcgtgcccggcagcgtgtggatggagagggacgtgtacctccaaggacccatctgggccaagatcccagagacgggggcgcactttcacccctctccggccatgggcggattcggactcaaacacccaccgcccatgatgctcatcaagaacacgcctgtgcccggaaatatcaccagcttctcggacgtgcccgtcagcagcttcatcacccagtacagcaccgggcaggtcaccgtggagatggagtgggagctcaagaaggaaaactccaagaggtggaacccggagatccagtacacaaacaactacaacgacccccagtttgtggactttgccccggacagcaccggggaatacagaaccaccagacctatcggaacccgataccttacccgacccctttaa

SEQ ID NO: 823 - DNA, 2175 bp, Artificial Sequence
  source: /note="Description of Artificial Sequence: Synthetic polynucleotide"
atgtcttttgttgatcaccctccagattggttggaagaagttggtgaaggtcttcgcgagtttttgggccttgaagcgggcccaccgaaaccaaaacccaatcagcagcatcaagatcaagcccgtggtcttgtgctgcctggttataactatctcggacccggaaacggtctcgatcgaggagagcctgtcaacagggcagacgaggtcgcgcgagagcacgacatctcgtacaacgagcagcttgaggcgggagacaacccctacctcaagtacaaccacgcggacgccgagtttcaggagaagctcgccgacgacacatccttcgggggaaacctcggaaaggcagtctttcaggccaagaaaagggttctcgaaccttttggcctggttgaagagggtgctaagacggcccctaccggaaagcggatagacgaccactttccaaaaagaaagaaggcccggaccgaagaggactccaagccttccacctcgtcagacgccgaagctggacccagcggatcccagcagctgcaaatcccagcccaaccagcctcaagtttgggagctgatacaatgtctgcgggaggtggcggcccattgggcgacaataaccaaggtgccgatggagtgggcaatgcctcgggagattggcattgcgattccacgtggatgggggacagagtcgtcaccaagtccacccgaacctgggtgctgcccagctacaacaaccaccagtaccgagagatcaaaagcggctccgtcgacggaggcaacgccaacgcctactttggatacagcaccccctgggggtactttgactttaaccgcttccacagccactggagcccccgggactggcaaagactcatcaacaactactggggcttcagaccccggtccctcagagtcaaaatcttcaacattcaagtcaaagaggtcacggtgcaggactccaccaccaccatcgccaacaacctcacctccaccgtccaagtgtttacggacgacgactaccagctgccctacgtcgtcggcaacgggaccgagggatgcctgccggccttccctccgcaggtctttacgctgccgcagtacggttacgcgacgctgaaccgcgacaacacagaaaatcccaccgagaggagcagcttcttctgcctagagtactttcccagcaagatgctgagaacgggcaacaactttgagtttacctacaactttgaggaggtgcccttccactccagcttcgctcccagtcagaacctcttcaagctggccaacccgctggtggaccagtacttgtaccgcttcgtgagcacaaataacactggcggagtccagttcaacaagaacctggccgggagatacgccaacacctacaaaaactggttcccggggcccatgggccgaacccagggctggaacctgggctccggggtcaaccgcgccagtgtcagcgccttcgccacgaccaataggatggagctcgagggcgcgagttaccaggtgcccccgcagccgaacggcatgaccaacaacctccagggcagcaacacctatgccctggagaacactatgatcttcaacagccagccggcgaacccgggcaccaccgccacgtacctcgagggcaacatgctcatcaccagcgagagcgagacgcagccggtgaaccgcgtggcgtacaacgtcggcgggcagatggccaccaacaaccagagctccaccactgcccccgcgaccggcacgtacaacctccaggaaatcgtgcccggcagcgtgtggatggagagggacgtgtacctccaaggacccatctgggccaagatcccagagacgggggcgcactttcacccctctccggccatgggcggattcggactcaaacacccaccgcccatgatgctcatcaagaacacgcctgcgcccggaaatatcaccagcttctcggacgtgcccgtcagcagcttcatcacccagtacagcaccgggcaggtcaccgtggagatggagtgggagctcaagaagggaaactccaagaggtggaacccagagatccagtacacaaacaactacaacgacccccagtttgtggactttgccccggacagcaccggggaatacagaaccaccagacctatcggaacccgataccttacccgacccctttaa

SEQ ID NO: 824 - DNA, 2175 bp, Artificial Sequence
  source: /note="Description of Artificial Sequence: Synthetic polynucleotide"
atgtcttttgttgatcaccctccagattggttggaagaagttggtgaaggtcttcgcgagtttttgggccttgaagcgggcccaccgaaaccaaaacccaatcagcagcatcaagatcaagcccgtggtcttgtgctgcctggttataactatctcggacccggaaacggtctcgatcgaggagagcctgtcaacagggcagacgaggtcgcgcgagagcacgacatctcgtacaacgagcagcttgaggcgggagacaacccctacctcaagtacaaccacgcggacgccgagtttcaggagaagctcgccgacgacacgtccttcgggggaaacctcggaaaggcagtctttcaggccaagaaaagggttctcgaaccttttggcctggttgaagagggtgctaagacggcccctaccggaaagcggatagacgaccactttccaaaaagaaagaaggcccggaccgaagaggactccaagccttccacctcgtcagacgccgaagctggacccagcggatcccagcagctgcaaatcccagcccaaccagcctcaagtttgggagctgatacaatgtctgcgggaggtggcggcccattgggcgacaataaccaaggtgccgatggagtgggcaatgcctcgggagattggcattgcgattccacgtggatgggggacagagtcgtcaccaagtccacccgaacctgggtgctgcccagctacaacaaccaccagtaccgagagatcaaaagcggctccgtcgacggaagcaacgccaacgcctactttggatacagcaccccctgggggtactttgactttaaccgcttccacagccactggagcccccgagactggcaaagactcatcaacaactactggggcttcagaccccggtccctcagagtcaaaatcttcaacattcaagtcaaagaggtcacggtgcaggactccaccaccaccatcgccaacaacctcacctccaccgtccaagtgtttacggacgacgactaccagctgccctacgtcgtcggcaacgggaccgagggatgcctgccggccttccctccgcaggtctttacgctgccgcagtacggttacgcgacgctgaaccgcgacaacacagaaaatcccaccgagaggagcagcttcttctgcctagagtactttcccagcaagatgctgagaacgggcaacaactttgagtttacctacaactttgaggaggtgcccttccactccagcttcgctcccagtcagaacctcttcaagctggccaacccgctggtggaccagtacttgtaccgcttcgtgagcacaaataacactggcggagtccagttcaacaagaacctggccgggagatacgccaacacctacaaaaactggttcccggggcccatgggccgaacccagggctggaacctgggctccggggtcaaccgcgccagtgtcagcgccttcgccacgaccaataggatggagctcgagggcgcgagttaccaggtgcccccgcagccgaacggcatgaccaacaacctccagggcagcaacacctatgccctggagaacactatgatcttcaacagccagccggcgaacccgggcaccaccgccacgtacctcgagggcaacatgctcatcaccagcgagagcgagacgcagccggtgaaccgcgtggcgtacaacgtcggcgggcagatggccaccaacaaccagagctccaccactgcccccgcgaccggcacgtacaacctccaggaaatcgtgcccggcagcgtgtggatggagagggacgtgtacctccaaggacccatctgggccaagatcccagagacgggggtgcactttcacccctctccggccatgggcggattcggactcaaacacccaccgcccatgatgctcatcaagaacacgcctgtgcccggaaatatcaccagcttctcggacgtgcccgtcagcagcttcatcacccagtacagcaccgggcaggtcaccgtggagatggagtgggagctcaagaaggaaaactccaagaggtggaacccagagatccagtacacaaacaactacaacgacccccagtttgtggactttgccccggacagcaccggggaatacagaaccaccagacctatcggaacccgataccttacccgacccctttaa

SEQ ID NO: 825 - DNA, 2175 bp, Artificial Sequence
  source: /note="Description of Artificial Sequence: Synthetic polynucleotide"
  modified_base (1652)..(1652): a, c, t, or g
atgtcttttgttgatcaccctccagattggttggaagaagttggtgaaggtcttcgcgagtttttgggccttgaagcgggcccaccgaaaccaaaacccaatcagcagcatcaagatcaagcccgtggtcttgtgctgcctggttataactatctcggacccggaaacggtctcgatcgaggagagcctgtcaacagggcagacgaggtcgcgcgagagcacgacatctcgtacaacgagcagcttgaggcgggagacaacccctacctcaagtacaaccacgcggacgccgagtttcaggagaagctcgccgacgacacatccttcgggggaaacctcggaaaggcagtctttcaggccaagaaaagggttctcgaaccttttggcctggttgaagagggtgctaagacggcccctaccggaaagcggatagacgaccactttccaaaaagaaagaaggcccggaccgaggaggactccaagccttccacctcgtcagacgccgaagctggacccagcggatcccagcagctgcaaatcccagcccaaccagcctcaagtttgggagctgatacaatgtctgcgggaggtggcggcccattgggcgacaataaccaaggtgccgatggagtgggcaatgcctcgggagattggcattgcgattccacgtggatgggggacagagtcgtcaccaagtccacccgaacctgggtgctgcccagctacaacaaccaccagtaccgagagatcaaaagcggctccgtcgacggaagcaacgccaacgcctactttggatacagcaccccctgggggtactttgactttaaccgcttccacagccactggagcccccgagactggcaaagactcatcaacaactactggggcttcagaccccggtccctcagagtcaaaatcttcaacattcaagtcaaagaggtcacggtgcaggactccaccaccaccatcgccaacaacctcacctccaccgtccaagtgtttacggacgacgactaccagctgccctacgtcgtcggcaacgggaccgagggatgcctgccggccttccctccgcaggtctttacgctgccgcagtacggttacgcgacgctgaaccgcgacaacacagaaaatcccaccgagaggagcagcttcttctgcctagagtactttcccagcaagatgctgagaacgggcaacaactttgagtttacctacaactttgaggaggtgcccttccactccagcttcgctcccagtcagaacctcttcaagctggccaacccgctggtggaccagtacttgtaccgcttcgtgagcacaaataacactggcggagtccagttcaacaagaacctggccgggagatacgccaacacctacaaaaactggttcccggggcccatgggccgaacccagggctggaacctgggctccggggtcaaccgcgccagtgtcagcgccttcgccacgaccaataggatggagctcgagggcgcgagttaccaggtgcccccgcagccgaacggcatgaccaacaacctccagggcagcaacacctatgccctggagaacactatgatcttcaacagccagccggcgaacccgggcaccaccgccacgtacctcgagggcagcatgctcatcaccancgagagcgagacgcagccggtgaaccgcgtggcgtacaacgtcggcgggcagatggccaccaacaaccagagctccaccactgcccccgcgaccggcacgtacaacctccaggaaatcgtgcccggcagcgtgtggatggagagggacgtgtacctccaaggacccatctgggccaagatcccagagacgggggcgcactttcacccctctccggccatgggcggattcggactcaaacacccaccgcccatgatgctcatcaagaacacgcctgtgcccggaaatatcaccagcttctcggacgtgcccgtcagcagcttcatcacccagtacagcaccgggcaggtcaccgtggagatggagtgggagctcaagaaggaaaactccaagaggtggaacccagagatccagtacacaaacaactacaacgacccccagtttgtggactttgccccggacagcaccggggaatacagaaccaccagacctatcggaacccgataccttacccgacccctttaa

SEQ ID NO: 826 - DNA, 2211 bp, Artificial Sequence
  source: /note="Description of Artificial Sequence: Synthetic polynucleotide"
atggctgctgacggttatcttccagattggctcgaggacaacctttctgaaggcattcgtgagtggtgggctctgaaacctggagtccctcaacccaaagcgaaccaacaacaccaggacaaccgtcggggtcttgtgcttccgggttacaaatacctcggacccggtaacggactcgacaaaggagagccggtcaacgaggcggacgcggcagccctcgaacacgacaaagcttacgaccagcagctcaaggccggtgacaacccgtacctcaagtacaaccacgccgacgccgagtttcaggagcgtcttcaagaagatacgtcttttgggggcaaccttggcagagcagtcttccaggccaaaaagaggatccttgagcctcttggtctggttgaggaagcagctaaaacggctcctggaaagaagaggcctgtagatcagtctcctcaggaaccggactcatcatctggtgttggcaaatcgggcaaacagcctgccagaaaaagactaaatttcggtcagactggcgactcagagtcagtcccagaccctcaacctctcggagaaccaccagcagcccccacaagtttgggatctaatacaatggcttcaggcggtggcgcaccaatggcagacaataacgagggtgccgatggagtgggtaattcctcaggaaattggcattgcgattcccaatggctgggcgacagagtcatcaccaccagcaccagaacctgggccctgcccacttacaacaaccatctctacaagcaaatctccagccaatcaggagcttcaaacgacaaccactactttggctacagcaccccttgggggtattttgactttaacagattccactgccacttctcaccacgtgactggcagcgactcattaacaacaactggggattccggcccaagaaactcagcttcaagctcttcaacatccaagttaaagaggtcacgcagaacgatggcacgacgactattgccaataaccttaccagcacggttcaagtgtttacggactcggagtatcagctcccgtacgtgctcgggtcggcgcaccaaggctgtctcccgccgtttccagcggacgtcttcatggtccctcagtatggatacctcaccctgaacaacggaagtcaagcggtgggacgctcatccttttactgcctggagtacttcccttcgcagatgctaaggactggaaataacttccaattcagctataccttcgaggatgtaccttttcacagcagctacgctcacagccagagtttggatcgcttgatgaatcctcttattgatcagtatctgtactacctgaacagaacgcaaggaacaacctctggaacaaccaaccaatcacggctgctttttagccaggctgggcctcagtctatgtctttgcaggccagaaattggctacctgggccctgctaccggcaacagagactttcaaagactgctaacgacaacaacaacagtaactttccttggacagcggccagcaaatatcatctcaatggccgcgactcgctggtgaatccaggaccagctatggccagtcacaaggacgatgaagaaaaatttttccctatgcacggcaatctaatatttggcaaagaagggacaacggcaagtaacgcagaattagataatgtaatgattacggatgaagaagagattcgtaccaccaatcctgtggcaacagagcagtatggaactgtggcaaataacttgcagagctcaaatacagctcccacgactagaactgtcaatgatcagggggccttacctggcatggtgtggcaagatcgtgacgtgtaccttcaaggacctatctgggcaaagattcctcacacggatggacactttcatccttctcctctgatgggaggctttggactgaaacatccgcctcctcaaatcatgatcaaaaatactccggtaccggcaaatcctccgacgactttcagcccggccaagtttgcttcatttatcactcagtactccactggacaggtcagcgtggaaattgagtgggagctacagaaagaaaacagcaaacgttggaatccagagattcagtacacttccaactacaacaagtctgttaatgtggactttactgtagacactaatggtgtttatagtgaacctcgccctattggaacccggtatctcacacgaaacttgtaa

SEQ ID NO: 827 - DNA, 2205 bp, Artificial Sequence; identical to SEQ ID NO: 95
  source: /note="Description of Artificial Sequence: Synthetic polynucleotide"

SEQ ID NO: 828 - DNA, 2234 bp, Artificial Sequence
  source: /note="Description of Artificial Sequence: Synthetic polynucleotide"
atgtcttttgttgatcaccctccagattggttggaagaagttggtgaaggtcttcgcgagtttttgggccttgaagcgggcccaccgaaaccaaaacccaatcagcagcatcaagatcaagcccgtggtcttgtgctgcctggttataactatctcggacccggaaacggtctcgatcgaggagagcctgtcaacagggcagacgaggtcgcgcgagagcacgacatctcgtacaacgagcagcttgaggcgggagacaacccctacctcaagtacaaccacgcggacgccgagtttcaggagaagctcgccgacgacacatccttcgggggaaacctcggaaaggcagtctttcaggccaagaaaagggttctcgaaccttttggcctggttgaagagggtgctaagacggcccctaccggaaagcggatagacgaccactttccaaaaagaaagaaggctcggaccgaagaggactccaagccttccacctcgtcagacgccgaagctggacccagcggatcccagcagctgcaaatcccagcccaaccagcctcaagtttgggagctgatacaatgtctgcgggaggtggcggcccattgggcgacaataaccaaggtgccgatggagtgggcaatgcctcgggagattggcattgcgattccacgtggatgggggacagagtcgtcaccaagtccacccgaacctgggtgctgcccagctacaacaaccaccagtaccgagagatcaaaagcggctccgtcgacggaagcaacgccaacgcctactttggatacagcaccccctgggggtactttgactttaaccgcttccacagccactggagcccccgagactggcaaagactcatcaacaactactggggcttcagaccccggtccctcagagtcaaaatcttcaacattcaagtcaaagaggtcacggtgcaggactccaccaccaccatcgccaacaacctcacctccaccgtccaagtgtttacggacgacgactaccagctgccctacgtcgtcggcaacgggaccgagggatgcctgccggccttccctccgcaggtctttacgctgccgcagtacggttacgcgacgctgaaccgcgacaacacagaaaatcccaccgagaggagcagcttcttctgcctagagtactttcccagcaagatgctgagaacgggcaacaactttgagtttacctacaactttgaggaggtgcccttccactccagcttcgctcccagtcagaacctgttcaagctggccaacccgctggtggaccagtacttgtaccgcttcgtgagcacaaataacactggcggagtccagttcaacaagaacctggccgggagatacgccaacacctacaaaaactggttcccggggcccatgggccgaacccagggctggaacctgggctccggggtcaaccgcgccagtgtcagcgccttcgccacgaccaataggatggagctcgagggcgcgagttaccaggtgcccccgcagccgaacggcatgaccaacaacctccagggcagcaacacctatgccctggagaacactatgatcttcaacagccagccggcgaacccgggcaccaccgccacgtacctcgagggcaacatgctcatcaccagcgagagcgagacgcagccggtgaaccgcgtggcgtacaacgtcggcgggcagatggccaccaacaaccagagctccaccactgcccccgcgaccggcacgtacaacctccaggaaatcgtgcccggcagcgtgtggatggagagggacgtgtacctccaaggacccatctgggccaagatcccagagacgggggcgcactttcacccctctccggccatgggcggattcggactcaaacacccaccgcccatgatgctcatcaagaacacgcctgtgcccggaaatatcaccagcttctcggacgtgcccgtcagcagcttcatcacccagtacagcaccgggcaggtcaccgtggagatggagtgggagctcaagaaggaaaactccaagaggtggaacccagagatccagtacacaaacaactacaacgacccccagtttgtggactttgccccggacagcaccggggaatacagaaccaccagacctatcggaacccgataccttacccgacccctttaacccattcatgtcgcataccctcaataaaccgtgtattcgtgtcagtaaaatactgcctc

SEQ ID NO: 829 - protein, 736 aa, Artificial Sequence
  source: /note="Description of Artificial Sequence: Synthetic polypeptide"
MAADGYLPDWLEDNLSEGIREWWALKPGVPQPKANQQHQDNRRGLVLPGYKYLGPGNGLDKGEPVNEADAAALEHDKAYDQQLKAGDNPYLKYNHADAEFQERLQEDTSFGGNLGRAVFQAKKRILEPLGLVEEAAKTAPGKKRPVDQSPQEPDSSSGVGKSGKQPARKRLNFGQTGDSESVPDPQPLGEPPAAPTSLGSNTMASGGGAPMADNNEGADGVGNSSGNWHCDSQWLGDRVITTSTRTWALPTYNNHLYKQISSQSGASNDNHYFGYSTPWGYFDFNRFHCHFSPRDWQRLINNNWGFRPKKLSFKLFNIQVKEVTQNDGTTTIANNLTSTVQVFTDSEYQLPYVLGSAHQGCLPPFPADVFMVPQYGYLTLNNGSQAVGRSSFYCPEYFPSQMLRTGNNFQFSYTFEDVPFHSSYAHSQSLDRLMNPLIDQYLYYLNRTQGTTSGTTNQSRLLFSQAGPQSMSLQARNWLPGPCYRQQRLSKTANDNNNSNFPWTAASKYHLNGRDSLVNPGPAMASHKDDEEKFFPMHGNLIFGKEGTTASNAELDNVMITDEEEIRTTNPVATEQYGTVANNLQSSNTAPTTRTVNDQGALPGMVWQDRDVYLQGPIWAKIPHTDGHFHPSPLMGGFGLKHPPPQIMIKNTPVPANPPTTFSPAKFASFITQYSTGQVSVEIEWELQKENSKRWNPEIQYTSNYNKSVNVDFTVDTNGVYSEPHPIGTRYLTRNL

SEQ ID NO: 830 - protein, 736 aa, Artificial Sequence
  source: /note="Description of Artificial Sequence: Synthetic polypeptide"
MAADGYLPDWLEDNLSEGIREWWALKPGVPQPKANQQHQDNRRGLVLPGYKYLGPGNGLDKGEPVNEADAAALEHDKAYDQQLKAGDNPYLKYNHADAEFQERLQEDTSFGGNLGRAVFQAKKRILEPLGLVEEAAKTAPGKKRPVDQSPQEPDSSSGVGKSGKQPARKRLNFGQTGDSESVPDPQPLGEPPAAPTSLGSNTMASGGGAPMADNNEGADGVGNSSGNWHCDSQWLGDRVITTSTRTWALPTYNNHLYKQISSQSGASNDNHYFGYSTPWGYFDFNRFHCHFSPRDWQRLINNNWGFRPKKLSFKLFNIQVKEVTQNDGTTTVANNLTSTVQVFTDSEYQLPYVLGSAHQGCLPPFPADVFMVPQYGYLTLNNGSQAVGRSSFYCLEYFPSQMLRTGNNFQFSYTFEDVPFHSSYAHSQSLDRLMNPLIDQYLYYLNRTQGTTSGTTNQSRLLFSQAGPQSMSLQARNWLPGPCYRQQRLSKTANDNNNSNFPWTAASKYHLNGRDSLVNPGPAMASHKDDEEKFFPMHGNLIFGKEGTTASNAELDNVMITDEEEIRTTNPVATEQYGTVANNLQSSNTAPTTRTVNDQGALPGMVWQDRDVYLQGPIWAKIPHTDGHFHPSPLMGGFGLKHPPPQIMIKNTPVPANPPTTFSPAKFASFITQYSTGQVSVEIEWELQKENSKRWNPEIQYTSNYNKSVNVDFTVDTNGVYSEPRPIGTRYLTRNL

SEQ ID NO: 831 - protein, 736 aa, Artificial Sequence
  source: /note="Description of Artificial Sequence: Synthetic polypeptide"
MAADGYLPDWLEDNLSEGIREWWALKPGVPQPKANQQHQDNRRGLVLPGYKYLGPGNGLDKGEPVNEADAAALEHDKAYDQQLKAGDNPYLKYNHADAEFQERLQEDTSFGGNLGRAVFQAKKRILEPLGLVEEAAKTAPGKKRPVDQSPQEPDSSSGVGKSGKQPARKRLNFGQTGDSESVPDPQPLGEPPAAPTSLGSNTMASGGGAPMADNNEGADGVGNSSGNWHCDSQWLGDRVITTSTRTWALPTYNNHLYKQISGQSGASNDNHYFGYSTPWGYFDFNRFHCHFSPRDWQRLINNNWGFRPKKLSFKLFNIQVKEVTQNDGTTTIANNLTSTVQVFTDSEYQLPYVLGSAHQGCLPPFPADVFMVPQYGYLTLNNGSQAVGRSSFYCLEYFPSQMLRTGNNFQFSYTFEDVPFHSSYAHSQSLDRLMNPLIDQYLYYLNRTQGTTSGTTNQSRLLFSQAGPQSMSLQARNWLPGPCYRQQRLSKTANGNNNSNFPWTAASKYHLNGRDSLVNPGPAMASHKDDEEKFFPMHGNLIFGKEGTTASNAELDNVMITDEEEIRTTNPVATEQCGTVANNLQSSNTAPTTRTVNDQGALPGMVWQDRDVYLQGPIWAKIPHTDGHFHPSPLMGGFGLKHPPPQIMIKNTPVPANPPTTFSPAKFASFITQYSTGQVSVEIEWELQKENSKRWNPEIQYTSNYNKSVNVDFTVDTNGVYSEPRPIGTRYLTRNL

SEQ ID NO: 832 - protein, 736 aa, Artificial Sequence
  source: /note="Description of Artificial Sequence: Synthetic polypeptide"
MAADGYLPDWLEDNLSEGIREWWALKPGVPQPKANQQHQDNRRGLVLPGYKYLGPGNGLDKGEPVNEADAAALEHDKAYDQQLKAGDNPYLKYNHADAEFQERLQEDTSFGGNLGRAVFQAKKRILEPLGLVEGAAKTAPGKKRPVDQSPQEPDSSSGVGKSGKQPARKRLNFGQTGDSESVPDPQPLGEPPAAPTSLGSNTMASGGGAPMADNNEGADGVGNSSGNWHCDSQWLGDRVITTSTRTWALPTYNSHLYKQISSQSGASNDNHYFGYSTPWGYFDFNRFHCHFSPRDWQRLINNNWGFRPKKLSFKLFNIQVKEVTQNDGTTTIANNLTSTVQVFTDSEYQLPYVLGSAHQGCLPPFPADAFMVPQYGYLTLNNGSQAVGRSSFYCLEYFPSQMLRTGNNFQFSYTFEDVPFHGSYAHSQSLDRLMNPLIDQYLYYLNRTQGTTSGTTNQSRLLFSQAGPQSMSLQARNWLPGPCYRQQRLSKTANDNNNSNFPWTAASKYHLNGRDSLVNPGPAMASHKDDEEKFFPMHGNLIFGKEGTTASNAELDNVMITDEEEIRTTNPVATEQYGTVANNLQSSNTAPTTRTVNDQGALPGMVWQDRDVYLQGPIWAKIPHTDGHFHPSPLMGGFGLKHPPPQIMIKNTPVPANPPTTFSPAKFASFITQYSTGQVSVEIEWELQKENSKRWNPEIQYTSNYNKSVNVDFTVDTNGVYSEPRPIGTRYLTRNS

SEQ ID NO: 833 - protein, 736 aa, Artificial Sequence
  source: /note="Description of Artificial Sequence: Synthetic polypeptide"
MAADGYLPDWLEDNLSEGIREWWALKPGVPQPKANQQHQDNRRGLVLPGYKYLGPGNGLDKGEPVNEADAAALEHDKAYDQQLKAGDNPYLKYNHADAEFQERLQEDTSFGGNLGRAVFQAKKRILEPLGLVEGAAKTAPGKKRPVDQSPQEPDSSSGVGKSGKQLARKRLNFGQTGDSESVPDPQPLGEPPAAPTSLGSNTMASGGGAPMADNNEGADGVGNSSGNWHCDSQWLGDRVITTSTRTWALPTYNSHLYKQISGQSGASNDNHYFGYSTPWGYFDFNRFHCHFSPRDWQRLINNNWGFRPKKLSFKLFNIQVKEVTQNDGTTTIANNLTSTVQVFTDSEYQLPYVLGSAHQGCLPPFPADVFMVPQYGYLTLNNGSQAVGRSSFYCLEYFPSQMLRTGNNFQFSYTFEDVPFHSSYAHSQSLDRLMNPLIDQYLYYLNRTQGTTSGTTNQSRLLFSQAGPQSMSLQARNWLPGPCYRQQRLSKTANDNNNSNFPWTAASKYHLNGRDSLVNPGPAMASHKDDEEKFFPMHGNLIFGKEGTTASNAELDNVMITDEEEIRTTNPVATEQYGTVANNLQSSNTAPTTRTVNDQGALPGMVWQDRDVYLQGPIWAKIPHTDGHFHPSPLMGGFGLKHPPPQIMIKNTPVPANPPTTFSPAKFASFITQYSTGQVSVEIEWELQKENSKRWNPEIQYTSNYNKSVNVDFTVDTNGVYSEPRPIGTRYLTRNL

SEQ ID NO: 834 - protein, 736 aa, Artificial Sequence
  source: /note="Description of Artificial Sequence: Synthetic polypeptide"
MAADGYLPDWLEDNLSEGIREWWALKPGVPQPKANQQHQDDRRGLVLPGYKYLGPGNGLDKGEPVNEADAAALEHDKAYDQQLKAGDNPCLKYNHADAEFQERLQEDTSFGGNLGRAVFQAKKRILEPLGLVEEAAKTAPGKKRPVDQSPQEPDSSSGVGKSGKQPARKRLNFGQTGDSESVPDPQPLGEPPAAPTSLGSNTMASGGSAPMADNNEGADGVGNSSGNWHCDSQWLGDRVITTSTRTWALPTYNNHLYKQISSQSGASNDNHYFGYSTPWGYFDFNRFHCHFSPRDWQRLINNNWGFRPKKLSFKLFNIQVKEVTQNDGTTTIANNLTSTVQVFTDSEYQLPYVLGSAHQGCLPPFPADVFMVPQYGYLTLNNGSQAVGRSSFYCLEYFPSQMLRTGNNFQFSYTFEDVPFHSSYAHSQSLDRLMDPLIDQYLYYLNRTQGTTSGTTNQSRLLFSQAGPQSMSLQARNWLPGPCYRQQRLSKTANDNNNSNFPWTAASKYHLNGRDSLVNPGPAMASHKDDEEKFFPMHGNLIFGKEGTTASNAELDNVMITDEEEIRTTNPVATEQYGTVANNLQSSNTAPTTRTVNDQGALPGMVWQDRDVYLQGPIWAKIPHTDGHFHPSPLMGGFGLKHPPPQIMIKNTPVPANPPTTFSPAKFASFITQYSTGQVSVEIEWELQKENSKRWNPEIQYTSNYNKSVNVDFTVDTNGVYSEPRPIGTRYLTRNL

SEQ ID NO: 835 - protein, 736 aa, Artificial Sequence
  source: /note="Description of Artificial Sequence: Synthetic polypeptide"
MAADGYLPDWLEDNLSEGIREWWALKPGVPQPKANQQHQDDRRGLVLPGYKYLGPGNGLDKGEPVNEADAAALEHDKAYDQQLKAGDNPYLKYNHADAEFQERLQEDTSFGGNLGRAVFQAKKRILEPLGLVEEAAKTAPGKKRPVDQSPQEPDSSSGVGKSGKQPARKRLNFGQTGDSESVPDPQPLGEPPAAPTSLGSNTMASGGGAPMADNNEGADGVGNSSGNWHCDSQWLGNRVITTSTRTWALPTYNNHLYKQISSQSGASNDNHYFGYSTPWGYFDFNRFHCHFSPRDWQRLINNNWGFRPKKLSFKLFNIQVKEVTQNDGTTTIANNLTSTVQVFTDSEYQLPYVLGSAHQGCLPPFPADVFMVPQYGYLTLNNGSQAVGRSSFYCLEYFPSQMLRTGNNFQFSYTFEDVPFHSSYAHSQSLDRLMNPLIDQYLYYLNRTQGTTSGTTNQSRLLFSQAGPQSMSLQARNWLPGPCYRQQRLSKTANDNNNSNFPWTAASKYHLNGRDSLVNPGPAMASHKDDEEKFFPMHGNLIFGKEGTTASNAELDNVMITDEEEIRTTNPVATEQYGTVANNLQSSNTAPTTRTVNDQGALPGMVWQDRDVYLQGPIWAKIPHTDGHFHPSPLMGGFGLKHPPPQIMIKNTPVPANPPTTFSPAKFASFITQYSTGQVSVEIEWELQKENSKRWNPEIQYTSNYNKSVNVDFTVDTNGVYSEPRPIGTRYLTRNL

SEQ ID NO: 836 - protein, 736 aa, Artificial Sequence
  source: /note="Description of Artificial Sequence: Synthetic polypeptide"
MAADGYLPDWLEDNLSEGIREWWALKPGVPQPKANQQHQDDRRGLVLPGYKYLGPGNGLDKGEPVNEADAAALEHDKAYDQQLKAGDNPYLKYNHADAEFQERLQEDTSFGGNLGRAVFQAKKRILEPLGLVEEAAKTAPGKKRPVDQSPQEPDSSSGVGKSGKQPARKRLNFGQTGDSESVPDPQPLGEPPAAPTSLGSNTMASGGGAPMADNNEGADGVGNSSGNWHCDSQWLGDRVITTSTRTWALPTYNNHLYKQISSQSGASNDNHYFGYSTPWGYFDFNRFHCHFSPRDWQRLINNNWGFRPKKLSFKLFNIQVKEVTQNDGTTTIANNLTSTVQVFTDSEYQLPYVLGSAHQGCLPPFPADVFMVPQYGYLTLNNGSQAVGRSSFYCLEYFPSQMLRTGNNFQFSYTFEDVPFHSSYAHSQSLDRLMNPLIDQYLYYLNRTQGTTSGTTNQSRLLFSQAGPQSMSLQARNWLPGPCYRQQRLSKTANDNNNSNFPWTAASKYHLNGRDSLVNPGPAMASHKDDEEKFFPMHGNLIFGKEGTTASNAELDNVMITDEEEIRTTNPVATVQYGTVANNLQSSNTAPTTRTVNDQGALPGMVWQDRDVYLQGPIWAKIPHTDGHFHPSPLMGGFGLKHPPPQIMIKNTPVPANPPTTFSPAKFASFITQYSTGQVSVEIEWELQKENSKRWNPEIQYTSNYNKSVNVDFTVDTNGVYSEPRPIGTRYLTRNL

SEQ ID NO: 837 - protein, 735 aa, Artificial Sequence
  source: /note="Description of Artificial Sequence: Synthetic polypeptide"
MAADGYLPDWLEDNLSEGIREWWALKPGVPQPKANQQHQDNRRGLVLPGYKYLGPGNGLDKGEPVNEADAAALEHDKAYDQQLKAGDNPYLKYNHADAEFQERLQEDTSFGGNLGRAVFQAKKGILEPLGLVEEAAKTAPGKKRPVDQSPQEPDSSSGVGKSGKQPARKRLNFGQTGDSESVPDPQPLGEPPAAPTSLGSNTMASGGGAPMADNNEGADGVGNSSGNWHCDSQWLGDRVITTSTRTWALPTYNNHLYKQISSQSGASNDNHYFGYSTPWGYFDFNRFHCHFSPRDWQRLINNNWGFRPKKLSFKLFNIQVKEVTQNDGTTTIANNLTSTVQVFTDSEYQLPYVFGSAHQGCLPPFPADVFMVPQYGYLTLNNGSQAVGRSSFYCLEYFPSQMLRTGNNFQFSYTFEDVPFHSSYAHSQSSDRLMNPLIDQYLYYLNRTQGTTSGTTNQSRLLFSQAGPQSMSLQARNWLPGPCYRQQRLSKTANDNNNSNFPTAASKYHLNGRDSLVNPGPAMASHKDDEEKFFPMHGNLIFGKEGTTASNAELDNVMITDEEEIRTTNPVATEQYGTVANNLQSSNTAPTTRTVNDQGALPGMVWQDRDVYLQGPIWAKIPHTDGHFHPSPLMGGFGLKHPPPQIMIKNTPVPANPPTTFSPAKFASFITQYSTGQVSVEIEWELQKENSKRWNPEIQYTSNYNKSVNVDFTVDTNGVYSEPRPIGTRYLTRNL

SEQ ID NO: 838 - protein, 736 aa, Artificial Sequence
  source: /note="Description of Artificial Sequence: Synthetic polypeptide"
MAADGYLPDWLEDNLSEGIREWWALKPGVPQPKANQQHQDNRRGLVLPGYKYLGPGNGLDEGEPVNEADAAALEHDKAYDQQLKAGDNPYLKYNHADAEFQERLQEDTSFGGNLGRAVFQAKKRILEPLGLVEGAAKTAPGKKRPVDQSPQEPDSSSGVGKSGKQPARKRLNFGQTGDSESVPDPQPLGEPPAAPTSLGSNTMASGGGAPMADNNEGADGVGNSSGNWHCDSQWLGDRVITTSTRTWALPTYNSHLYKQISSQSGASNDNHYFGYSTPWGYFDFNRFHCHFSPRDWQRLINNNWGFRPKKLSFKLFNIQVKEVTQNDGTTTIANNLTSTVQVFTDSEYQLPYVLGSAHQGCLPPFPADVFMVPQYGYLTLNNGSQAVGRSSFYCLEYFPSQMLRTGNNFQFSYTFEDVPFHSSYAHSQSLDRLMNPLIDQYLYYLNRTQGTTSGTTNQSRLLFSQAGPQSMSLQARNWLPGPCYRQQRLSKTANDNNNSNFPWTAASKYHLNGRDSLVNPGPAMASHKDDEEKFFPMHGNLIFGKEGTTASNAELDNVMITDEEEIRTTNPVATEQYGTVANNLQSSNTAPTTRTVNDQGALPGMVWQDRDVYLQGPIWAKIPHTDGHFHPSPLMGGFGLKHPPPQIMIKNTPVPANPPTTFSPAKFASFITQYSTGQVSVEIEWELQKENSKRWNPEIQYTSNYNKSVNVDFTVDTNGVYSEPRPIGTRYLTRNL

SEQ ID NO: 839 - protein, 668 aa, Artificial Sequence
  source: /note="Description of Artificial Sequence: Synthetic polypeptide"
MAADGYLPDWLEDNLSEGIREWWALKPGVPQPKANQQHQDNRRGLVLPGYKYLGPGNGLDKGEPVNEADAAALEHDKAYDQQLKAGDNPYLKYNHADAEFQERLQEDTSFGGNLGRAVFQAKKRILEPLGLVEGAAKTAPGKKRPVDQSPQEPDSSSGVGKSGKQPARKRLNFGQTGDSESVPDPQPLGEPPAAPTSLGSNTMASGGGAPMADNNEGADGVGNSSGNWHCDSQWLGDRVITTSTRTWALPTYNSHLYKQISSQSGASNDNHYFGYSTPWGILTLTDSTATSHHVTGSDSLTTTGDSGPRNSASSSSTSKLKRSRRTMARRLLPITLPARFKCLRTRSISSRTCSGRRTKAVSRRFQRTPSWSLSMDTSPTTEVKRWDAHPFTAWSTSLRRCGLEITSNSAIPSRMYLFTAATLTARVWIAILLLISICTTTERKEQPLEQPTNHGCFLARLGLSLCLCRPEIGYLGPATGNRDFQRLLTTTTTVTFLGQRPANIISMAATRWIQDQLWPVTRTMKKNFSLCTAIRGPYLAWCGKIVTCTFKDLSGQRFLTRMDTFILLLWEALDNIRLLKSSKILRYRQILRRLSARPSLLHLSLSTPLDRSAWKLSGSYRKKTANVGIQRFSTLPTTTSLLMWTLLTLMVFIVNLALLEPGISHETC

SEQ ID NO: 840 - protein, 734 aa, Artificial Sequence
  source: /note="Description of Artificial Sequence: Synthetic polypeptide"
MTDGYLPDWLEDNLSEGVREWWALQPGAPKPKANQQHQDNARGLVLPGYKYLGPGNGLDKGEPVNAADAAALEHDKAYDQQLKAGDNPYLKYNHADAEFQQRLQGDTSFGGNLGRAVFQAKKRVLEPLGLVEQAGETAPGKKRPLIESPQQPDSSTGIGKKGKQPAKKKLVFEDETGAGDGPPEGSTSGAMSDDSEMRAATGGAAVEGGQGADGVGNASGDWHCDSTWSEGHVTTTSTRTWVLPTYNNHLYKRLGESLQSNTYNGFSTPWGYFDFNRFHCHFSPRDWQRLINNNWGMRPKAMRVKIFNIQVKEVTTSNGETTVANNLTSTVQIFADSSYELPYVMDAGQEGSLPPFPNDVFMVPQYGYCGLVTGNTSQQQTDRNAFYCLEYFPSQMLRTGNNFEITYSFEKVPFHSMYAHSQSLDRLMNPLIDQYLWGLQSTTTGTTLNAGTATTNFTKLRPTNLSNFKKNWLPGPSIKQQGFSKTANQNYKIPATGSDSLIKYETHSTLDGRWSALTPGPPMATAGPADSKFSNSQLIFAGPKQNGNTATVPGTLIFTSEEELAATNATDTDMWGNLPGGDQSNSNLPTVDRLTALGAVPGMVWQNRDIYYQGPIWAKIPHTDGHFHPSPLIGGFGLKHPPPQIFIKNTPVPANPATTFSSTPVNSFITQYSTGQVSVQIDWEIQKERSKRWNPEVQFTSNYGQQNSLLWAPDAAGKYTEPRAIGTRYLTHHL

SEQ ID NO: 841 - protein, 734 aa, Artificial Sequence
  source: /note="Description of Artificial Sequence: Synthetic polypeptide"
MTDGYLPDWLEDNLSEGVREWWALQPGAPKPKANQQHQDNARGLVLPGYKYLGPGNGLDKGEPVNAADAAALEHDKAYDQQLKAGDNPYLKYNHADAEFQQRLQGDTSFGGNLGRAVFQAKKRVLEPLGLVEQAGETAPGKKRPLIESPQQPDSSTGIGKKGKQPAKKKLVFEDETGAGDGPPEGSTSGAMSDDSEMRAAAGGAAVEGGQGADGVGNASGDWHCDSTWSEGHVTTTSTRTWVLPTYNNHLYKRLGESLQSNTYNGFSTPWGYFDFNRFHCHFLPRDWQRLINNNWGVRPKAMRVKIFNIQVKEVTTSNGETTVANNLTSTVQIFADSSYELPYVMDAGQEGSLPPFPNDVFMVPQYGYCGLVTGDTSQQQTDRNAFYCLEYFPSQMLRTGNNFEITYSFEKVPFHSMYAHSQSLDRLMNPLIDQYLWGLQSTTTGTTLNAGTATTNFTKLRPTNFSNFKKNWLPGPSIKQQGFSKTANQNYKIPATGSDSLIKYETHSTLDGRWSALTPGPPMATAGPADSKFSNSQLIFAGPKQNGNTATVPGTLIFTSEEELAATNATDTDMWGNLPGGDQSNSNLPTVDRLTALGAVPGMVWQNRDIYYQGPIWAKIPHTDGHFHPSPLIGGFGLKHPPPQIFIKNTPVPANPATTFSSTPVNSFITQYSTGQVSVQIDWEIQKERSKRWNPEVQFTSNYGQQNSLLWAPDAAGKYTEPRAIGTRYLTHHL

SEQ ID NO: 842 - protein, 734 aa, Artificial Sequence
  source: /note="Description of Artificial Sequence: Synthetic polypeptide"
MTDGYLPDWLEDNLSEGVREWWALQPGAPKPKANQQHQDNARGLVLPGYKYLGPGNGLDEGEPVNAADAAALEHDKAYDQQLKAGDNPYLKYNHADAEFQQRLQGDTSFGGNLGRAVFQAKKRVLEPLGLVEQAGETAPGKKRPLIESPQQPDSSTGIGKKGKQPAKKKLVFEDETGAGDGPPEGSTSGAMSDDSEMRAAAGGAAVEGGQGADGVGNASGDWHCDSTWSEGHVTTTSTRTWVLPTYNNHLYKRLGESLQSNTYNGFSTPWGYFDFNRFHCHFSPRDWQRLINNNWGMRPKAMRVKIFNIQVKEVTTSNGETTVANNLTSTVQIFADSSYELPYVMDAGQEGSLPPFPNDVFMVPQYGYCGLVTGNTSQQQTDRNAFYCLEYFPSQMLRTGNNFEITYSFEKVPFHSMYAHSQSLDRLMNPLIDQYLWGLQSTTTGTTLNAGTATTNFTKLRPTNFSNFKKNWLPGPSIKQQGFSKTANQNYKIPATGSDSLIKYETHSTLDGRWSALTPGPPMATAGPADSKFSNSQLIFAGPKQNGNTATVPGTLIFTSEEELAATNATDTDMWGNLPGGDQSNSNLPTVDRLTALGAVPGMVWQNRDIYYQGPIWAKIPHTDGHFHPSPLIGGFGLKHPPPQIFIKNTPVPANPATTFSSTPVNSFITQYSTGQVSVQIDWEIQKERSKRWNPEVQFTSNYGQQNSLLWAPDAAGKYTEPRAIGTRYLTHHL

SEQ ID NO: 843 - protein, 734 aa, Artificial Sequence
  source: /note="Description of Artificial Sequence: Synthetic polypeptide"
MTDGYLPDWLEDNLSEGVREWWALQPGAPKPKANQQHQDNARGLVLPGYKYLGPGNGLDKGEPVNAADAAALEHDKAYDQQLKAGDNPYLKYNHADAEFQQRLQGDTSFGGNLGRAVFQAKKRVLEPLGLVEQAGETAPGKKRPLIESPQQPDSSTGIGKKGKQPAKKKLVFEDGTGAGDGPPEGSTSGAMSDDSEMRAAAGGAAVEGGQGADGVGNASGDWHCDSTWSEGHVTTTSTRTWVLPTYNNHLYKRLGESLQSNTYNGFPTPWGYFDFNRFHCHFSPRDWQRLINNNWGMRPKAMRVKIFNIQVKEVTTSNGETTAANNLTSTVQIFADSSYELPYVMDAGQEGSLPPFPNDVFMVPQYGYCGLVTGNTSQQQTDRNAFYCLEYFPSQMLRTGNNFEITYSFEKVPFHSMYAHSQSLDRLMNPLIDQYLWGLQSTTTGTTLNAGTATTNFTKLRPTNFSNFKKNWLPGPSIKQQGFSKTANQNYKIPATGSDSLIKYETHSTLDGRWSALTPGPPMATAGPADSKFSNSQLIFAGPKQNGNTATVPGTLIFTSEEELAATNATDTDMWGNLPGGDQSNSNLPTVDRLTALGAVPGMVWQNRDIYYQGPIWAKIPHTDGHFHPSPLIGGFGLKHPPPQIFIKNTPVPANPATTFSSTPVNSFITQYSTGQVSVQIDWEIQKERSKRWNPEVQFTSNYGQQNSLLWAPDAAGKYTEPRAIGTRYLTHHL

SEQ ID NO: 844 - protein, 734 aa, Artificial Sequence
  source: /note="Description of Artificial Sequence: Synthetic polypeptide"
MTDGYLPDWLEDNLSEGVREWWALQPGAPKPKANQQHQDNARGLVLPGYKYLGPGNGLDKGEPVNAADAAALEHDKAYDQQLKAGDNPYLKYNHADAEFQQRLQGDTSFGGNLGRAVFQAKKRVLEPLGLVEQAGETAPGKKRPLIESPQQPDSSTGIGKKGKQPAKKKLVFEDETGAGDGPPEGSTSGAMSDDSEMRAAAGGAAVEGGQGADGVGNASGDWHCDSTWSEGHVTTTSTRTWVLPTYNNHLYKRLGESLQSNTYNGFSTPWGYFDFNRFHCHFSPRDWQRLINNNWGMRPKAMRVKIFNIQVKEVTTSNGETTVANNLTSTVQIFADSSYELPYVMDAGQEGSLPPFPNDVFMVPQYGYRGLVTGNTSQQQTDRNAFYCLEYFPSQMLRTGNNFEITYSFEKVPFHSMYAHSQSLDRLMNPLIDQYLWGLQSTTTGTTLNAGTATTNFTKLRPTNFSNFKKNWLPGPSIKQQGFSKTANQNYKIPATGSDSLIKYETHSTLDGRWSALTPGPPMATAGPADSKFSNSQLIFAGPKQNGNTATVPGTLIFTSEEELAATNATDTDMWGNLPGGDQSNSNLPTVDRLTALGAVPGMVWQNRDIYYQGPIWAKIPHTDGHFHPSPLIGGFGLKHPPPQIFIKNTPVPANPATTFSSTPVNSFITQYSTGQVSVQIDWEIQKERSKRWNPEVQFTSNYGQQNSLLWAPDAAGKYTEPRAIGTRYLTHHL

SEQ ID NO: 845 - protein, 734 aa, Artificial Sequence
  source: /note="Description of Artificial Sequence: Synthetic polypeptide"
MTDGYLPDWLEDNLSEGVREWWALQPGAPKPKANQQHQDNARGLVLQGYKYLGPGNGLDKGEPVNAADAAALEHDKAYDQQLKAGDNPYLKYNHADAEFQQRLQGDTSFGGNLGRAVFQAKKRVLEPLGLVEQAGETAPGKKRPLIESPQQPDSSTGIGKKGKQPAKKKLVFEDETGAGDGPPEGSTSGAMSDDSEMRAAAGGAAVEGGQGADGVGNASGDWHCDSTRSEGHVTTTSTRTWVLPTYNNHLYKRLGESLQSNTYNGFSTPWGYFDFNRFHCHFSPRDWQRLINNNWGMRPKAMRVKIFNIQVKEVTTSNGETTVANNLTSTVQIFADSSYELPYVMDAGQEGSLPPFPNDVFMVPQYGYCGLVTGNTSQQQTDRNAFYCLEYFPSQMLRTGNNFEITYSFEKVPFHSMYAHSQSLDRLMNPLIDQYLWGLQSTTTGTTLNAGTATTNFTKLRPTNFSNFKKNWLPGPSIKQQGFSKTANQNYKIPATGSDSLIKYETHSTLDGRWSARTPGPPMATAGPADSKFSNSQLIFAGPKQNGNTATVPGTLIFTSEEELAATNATDTDMWGNLPGGDQSNSNLPTVDRLTALGAVPGMVWQNRDIYYQGPIWAKIPHTDGHFHPSPLIGGFGLKHPPPQIFIKNTPVPANPATTFSSTPVNSFITQYSTGQVSVQIDWEIQKERSKRWNPEVQFTSNYGQQNSLLWAPDAAGKYTEPRAIGTRYLTHHL

SEQ ID NO: 846 - protein, 724 aa, Artificial Sequence
  source: /note="Description of Artificial Sequence: Synthetic polypeptide"
MSFVDHPPDWLEEVGEGLREFLGLEAGPPKPKPNQQHQDQARGLVLPGYNYLGPGNGLDRGEPVNRADEVAREHDISYNEQLEAGDNPYLKYNHADAEFQERLADDTSFGGNLGKAVFQAKKRVLEPFGLVEEGAKTAPTGKRIDDHFPKRKKARTEEDSKPSTSSDAEAGPSGSQQLQIPAQPASSLGADTMSAGGGGPLGDNNQGADGVGNASGDWHCDSTWMGDRVVTKSTRTWVLPSYNNHQYREIKSGSVDGSNANAYFGYSTPWGYFDFNRFHSHWSPRDWQRLINNYWGFRPRSLRVKIFNIQVKEVTVQDSTTTIANNLTSTVQVFTDDDYQLPYVVGNGTEGCLPAFPPQVFTLPQYGYATLNRDNTENPTERSSFFCLEYFPSKMLRTGNNFEFTYNFEEVPFHSSFAPSQNLFKLANPLVDQYLYRFVSTNNTGGVQFNKNLAGRYANTYKNWFPGPMGRTQGWNLGSGVNRASVSAFATTNRMELEGASYQVPPQPNGMTNNLQGSNTYALENTMIFNSQPANPGTTATYLEGNMLITSESETQPVNRVAYNVGGQMATNNQSSTTAPATGTYNLQEIVPGSVWMERDVYLQGPIWAKIPETEAHFHPSPAMGGFGLKHPPPMMLIKNTPVPGNITSFSDVPVSSFITQYSTGQVTVEMEWELKKENSKRWNPEIQYTNNYNDPQFVDFAPDSTGEYRTTRPIGTRYLTRPL

SEQ ID NO: 847 - protein, 724 aa, Artificial Sequence
  source: /note="Description of Artificial Sequence: Synthetic polypeptide"
MSFVDHPPDWLEEVGEGLREFLGLEAGPPKPKPNQQHQDQARGLVLPGYNYLGPGNGLDRGEPVNRADEVAREHDISYNEQLEAGDNPYLKYNHADAEFQEKLADDTSSGGNLGKAVFQAKKRVLEPFGLVEEGAKTAPTGKRIDDHFPKRKKARTEEDSKPSTSSDAEAGPSGSQQLQIPAQPASSLGADTMSAGGGGPLGDNNQGADGVGNASGDWHCDSTWMGDRVVTKSTRTWVLPSYNNHQYREIKSGSVDGSNANAYFGYSTPWGYFDFNRFHSHWSPRDWQRLINNYWGFRPRSLRVKIFNIQVKEVTVQDSTTTIANNLTSTVQVFTDDDYQLPYVVGNGTEGCLPAFPPQVFTLPQYGYATLNRDNTENPTERSSFFCLEYFPSKMLRTGNNFEFTYNFEEVPFHSSFAPSQNLFKLANPLVDQYLYRFVSTNNTGGVQFNKNLAGRYANTYKNWFPGPMGRTQGWNLGSGVNRASVSAFATTNRMELEGASYQVPPQPNGMTNNLQGSNTYALENTMIFNSQPANPGTTATYLEGNMLITSESETQPVNRVAYNVGGQMATNNQSSTTAPATGTYNLQEIVPGSVWMERDVYLQGPIWAKIPETGAHFHPSPAMGGFGLKHPPPMMLIKNTPVPGNITSFSDVPVSSFITQYSTGQVTVEMEWELKKENSKRWNPEIQYTNNYNDPQFVDFAPDSTGEYRTTRPIGTRYLTRPL

SEQ ID NO: 848 - protein, 724 aa, Artificial Sequence
  source: /note="Description of Artificial Sequence: Synthetic polypeptide"
MSFVDHPPDWLEEVGEGLREFLGLEAGPPKPKPNQQHQDQARGLVLPGYNYLGPGNGLDRGEPVNRADEVAREHDISYNEQLEAGDNPYLKYNHADAEFQEKLADDTSFGGNLGKAVFQAKKRVLEPFGLVEEGAKTAPTGKRIDDHFPKRKKARTEEDSKPSTSSDAEAGPSGSQQLQIPAQPASSLGADTMSAGGGGPLGDNNQGADGVGNASGDWHCDSTWMGDRVVTKSTRTWVLPSYNNHQYREIKSGSVDGSNANAYFGYSTPWGYFDFNRFHSHWSPRDWQRLINNYWGFRPRSLRVKIFNIQVKEVTVQDSTTTIANNLTSTVQVFTDDDYQLPYVVGNGTEGCLPAFPPQVFTLPQYGYATLNRDNTENPTERSSFFCLEYFPSKMLRTGNNFEFTYNFEEVPFHSSFAPSQNLFKLANPLVDQYLYRFVSTNNTGGVQFNKNLAGRYANTYKNWFPGPMGRTQGWNLGSGVNRASVSAFATTNRMELEGASYQVPPQPNGMTNNLQGSNTYALENTMIFNSQPANPGTTATYLEGNMLITSESETQPVNRVAYNVGGQMATNNQSSTTAPATGTYNLQEIVPGSVWMERDVYLQGPIWAKIPETGAHFHPSPAMGGFGLKHPPPMMLIKSTPVPGNITSFSDVPVSSFITQYSTGQVTVEMEWELKKENSKRWNPEIQYTNNYNDPQFVDFAPDSTGEYRTTRPIGTRYLTRPL

SEQ ID NO: 849 - protein, 724 aa, Artificial Sequence
  source: /note="Description of Artificial Sequence: Synthetic polypeptide"
MSFVDHPPDWLEEVGEGLREFLGPEAGPPKPKPNQQHQDQARGLVLPGYNYLGPGNGLDRGEPVNRADEVAREHDISYNEQLEAGDNPYLKYNHADAEFQEKLADDTSFGGNLGKAVFQAKKRVLEPFGLVEEGAKTAPTGKRIDDHFPKRKKVRTEEDSKPSTSSDAEAGPSGSQQLQIPAQPASSLGADTMSAGGGGPLGDNNQGADGVGNASGDWHCDSTWMGDRVVTKSTRTWVPPSYNNHQYREIKSGSVDGSNANAYFGYSTPWGYFDFNRFHSHWSPRDWQRLINNYWGFRPRSLRVKIFNIQVKEVTVQDSTTTIANNLTSTVQVFTDDDYQLPYVVGNGTEGCLPAFPPQVFTLPQYGYATLNRDNTENPTERSSFFCLEYFPSKMLRTGNNFEFTYNFEEVPFHSSFAPSQNLFKLANPLVDQYLYRFVSTNNTGGVQFNKNLAGRYANTYKNWFPGPMGRTQGWNLGSGVNRASVSAFATTNRMELEGASYQVPPQPNGMTNNLQGSNTYALENTMIFNSQPANPGTTATYLEGNMLITSESETQPVNRVACNVGGQMATNNQSSTTAPATGTYNLQEIVPGSVWMERDVYLQGPIWAKIPETGAHFHPSPAMGGFGLKHPPPMMLIKNTPVPGNITSFSDVPVSSFITQYSTGQVTVEMEWELKKENSKRWNPEIQYTNNYNDPQFVDFAPDSTGEYRTTRPIGTRYLTRPL

SEQ ID NO: 850 - protein, 724 aa, Artificial Sequence
  source: /note="Description of Artificial Sequence: Synthetic polypeptide"
MSFVDHPPDWLEEVGEGLREFLGLEAGPPKPKPNQQHQDQARGLVLPGYNYLGPGNGLDRGEPVNRADEVAREHDISYNEQLEAGDNPYLKYNHADAEFQEKLADDTSFGGNLGKAVFQAKKRVLEPFGLVEEGAKTAPTGKRIDDHFPKRKKARTEEDSKPSTSSDAEAGPSGSQQLQIPAQPASSLGADTMSAGGGGPLGDNNQGADGVGNASGDWHCDSTWMGDRVVTKSTRTWVLPSYNNHQYREIKSGSVDGSNANAYFGYSTPWGYFDFNRFHSHWSPRDWQRLINNYWGFRPRSLRVKIFNIQVKEVTVQDSTTTIANNLTSTVQVFTDDDYQLPYVVGNGTEGCLPAFPPQVFTLPQYGYATLNRDNTENPTERSSFFCLEYFPSKMLRTGNNFEFTYNFEEVPFHSSFAPSQNLFKLANPLVDQYLYRFVSTNNTGGVQFNKNLAGRYANTYKNWFPGPMGRTQGWNLGSGVNRASVSAFATTNRMELEGASYQVPPQPNGMTNNLQGSNTYALENTMIFNSQPANPGTTATYLEGNMLITSESETQPVNRVAYNVGGQMATNNQSSTTAPATGAYNLQEIVPGSVWMERDVYLQGPIWAKIPETGAHFHPSPAMGGFGLKHPPPMMLIKNTPVPGNITSFSDVPVSSFITQYSTGQVTVEMEWELKKENSKRWNPEIQYTNNYNDPQFVDFAPDSTGEYRTTRPIGTRYLTRPL

SEQ ID NO: 851 - protein, 724 aa, Artificial Sequence
  source: /note="Description of Artificial Sequence: Synthetic polypeptide"
MSFVDHPPDWLEEVGEGLREFLGLEAGPPKPKPNQQHQDQARGLVLPGYNYLGPGNGLDRGEPVNRADGVAREHDISYNEQLEAGDNPYLKYNHADAEFQEKLADDTSFGGNLGKAVFQAKKRVLEPFGLVEEGAKTAPTGKRIDDHFPKRKKARTEEDSKPSTSSDAEAGPSGSQQLQIPAQPASSLGADTMSAGGGGPLGDNNQGADGVGNASGDWHCDSTWMGDRVVTKSTRTWVLPSYNNHQYREIKSGSVDGSNANAYFGYSTPWGYFDFNRFHSHWSPRDWQRLINNYWGFRPRSLRVKIFNIQVKEVTVQDSTTTIANNLTSTVQAFTDDDYQLPYVVGNGTEGCLPAFPPQVFTLPQYGYATLNRDNTENPTERSSFFCLEYFPSKMLRTGNNFEFTYNFEEVPFHSSFAPSQNLFKLANPLVDQYLYRFVSTNNTGGVQFNKNLAGRYANTYKNWFPGPMGRTQGWNLGSGVNRASVSAFATTNRMELEGASYQVPPQPNGMTNNLQGSNTYALENTMIFNSQPANPGTTATYLEGNMLITSESETQPVNRVAYNVGGQMATNNQSSTTAPATGTYNLQEIVPGSVWMERDVYLQGPIWAKIPETGAHFHPSPAMGGFGLKHPPPMMLIKNTPVPGNITSFSDVPVSSFITQYSTGQVTVEMEWELKKENSKRWNPEIQYTNNYNDPQFVDFAPDSTGEYRTTRPIGTRYLTRPL

SEQ ID NO: 852 - protein, 723 aa, Artificial Sequence
  source: /note="Description of Artificial Sequence: Synthetic polypeptide"
MSFVDHPPDWLEEVGEGLREFLGLEAGPPKPKPNQQHQDQARGLVLPGYNYLGPGNGLDRGEPVNRADEVAREHDISYNEQLEAGDNPYLKYNHADAEFQEKLADDTSFGGNLGKAVFQAKKRVLEPFGLVEEGAKTAPTGKRIDDHFPKRKKARTEEDSKPSTSSDAEAGPSGSQQLQIPAQPASSLGADTMSAGGGGPLGDNNQGADGVGNASGDWHCDSTWMGDRVVTKSTRTWVLPSYNNHQYREIKSGSVDGSNANAYFGYSTPWGYFDFNRFHSHWSPRDWQRLINNYWGFRPRSLRVKIFNIQVKEVTVQDSTTTIANNLTSTVQVFTDDDYQLPYVVGNGTEGCLPAFPPQVFTLPQYGYATLNRDNTENPTERSSFFCLEYFPSKMLRTGNNFEFTYNFEEVPFHSSFAPSQNLFKLANPLVDQYLYRFVSTNNTGGVQFNKNLAGRYANTYKNWFPGPMGRTQGWNLGSGVNRASVSAFATTNRMELEGASYVPPQPNGMTNNLQGSNTYALENTMIFNSQPANPGTTATYLEGNMLITSESETQPVNRVAYNVGGQMATNNQSSTTAPATGTYNLQEIVPGSVWMEGDVYLQGPIWAKIPETGAHFHPSPAMGGFGLKHPPPMMLIKNTPVPGNITSFSDVPVSSFITQYSTGQVTVEMEWELKKENSKRWNPEIQYTNNYNDPQFVDFAPDSTGEYRTTRPIGTRYLTRPL

SEQ ID NO: 853 - protein, 724 aa, Artificial Sequence
  source: /note="Description of Artificial Sequence: Synthetic polypeptide"
MSFVDHPPDWLEEVGEGLREFLGLEAGPPKPKPNQQHQDQARGLVLPGYNYLGPGNGLDRGEPVNRADEVAREHDISYNEQLEAGDNPYLKYNHADAEFQEKLADDTSFGGNLGKAVFQAKKRVLEPFGLVEEGAKTAPTGKRIDDHFPKRKKVRTEEDSKPSTSSDAEAGPSGSQQLQIPAQPASSLGADTMSAGGGGPLGDNNQGADGVGNASGDWHCDSTWMGDRVVTKSTRTWVLPSYNNHQYREIKSGSVDGSNANAYFGYSTPWGYFDFNRFHSHWSPRDWQRLINNYWGFRPRSLRVKIFNIQVKEVTVQDSTTTIANNLTSTVQVFTDDDYQLPYVVGNGTEGCLPAFPPQVFTLPQYGYATLNRDNTENPTERSSFFCLEYFPSKMLRTGNNFEFTYNFEEVPFHSSFAPSQNLFKLANPLVDQYLYRFVSTNNTGGVQFNKNLAGRYANTYKNWFPGPMGRTQGWNLGSGVNRASVSAFATTNRMELEGASYQVPPQPNGMTNNLQGSNTYALENTMIFNSQPANPGTTATYLEGNMLITSESETQPVNRVAYNVGGQMATNNQSSTTAPATGTYNLQEIVPGSVWMERDVYLQGPIWAKIPETGAHFHPSPAMGGFGLKHPPPMMLIKNTPVPGNITSFSDVPVSSFITQYSTGQVTVEMEWELKKENSERWNPEIQYTNNYNDPQFVDFAPDSTGEYRTTRPIGTRYLTRPL

SEQ ID NO: 854 - protein, 724 aa, Artificial Sequence
  source: /note="Description of Artificial Sequence: Synthetic polypeptide"
MSFVDHPPDWLEEVGEGLREFLGLEAGPPKPKPNQQHQDQARGLVLPGYNYLGPGNGLDRGEPVNRADEVAREHDISYSEQLEAGDNPYLKYNHADAEFQEKLADDTSFGGNLGKAVFQAKKRVLEPFGLVEEGAKTAPTGKRIDDHFPKRKKARTEEDSKPSTSSDAEAGPSGSQQLQIPAQPASSLGADTMSAGGGGPLGDNNQGADGVGNASGDWHCDSTWMGDRVVTKSTRTWVLPSYNNHQYREIKSGSVDGSNANAYFGYSTPWGYFDFNRFHSHWSPRDWQRLINNYWGFRPRSLRVKIFNIQVKEVTVQDSTTTIANNLTSTVQVFTDDDYQLPYVVGNGTEGCLPAFPPQVFTLPQYGYATLNRDNTENPTERSSFFCLEYFPSKMLRTGNNFEFTYNFEEVPFHSSFAPSQNLFKLANPLVDQYLYRFVSTNNTGGVQFNKNLAGRYANTYKNWFPGPMGRTQGWNLGSGVNRASVSAFATTNRMELEGASYQVPPQPNGMTNNLQGSNTYALENTMIFNSQPANPGTTATYLEGNMLITSESETQPVNRVAYNVGGQMATNNQSSTTAPATGTYNLQEIVPGSVWMERDVYLQGPIWAKIPETGAHFHPSPAMGGFGLKHPPPMMLIKNTPVPGNITSFSDVPVSSFITQYSTGQVTVEMEWELKKENSKRWNPEIQYTNNYNDPQFVDFAPDSTGEYRTARPIGTRYLTRPL

SEQ ID NO: 855 - protein, 724 aa, Artificial Sequence
  source: /note="Description of Artificial Sequence: Synthetic polypeptide"
MSFVDHPPDWLEEVGEGLREFLGPEAGPPKPKPNQQHQDQARGLVLPGYNYLGPGNGLDRGEPVNRADEVAREHDISYNEQLEAGDNPYLKYNHADAEFQEKLADDTSFGGNLGKAVFQAKKRVLEPFGLVEEGAKTAPTGKRIDDHFPKRKKARTEEDSKPSTSSDAEAGPSGSQQLQIPAQPASSLGADTMSAGGGGPLGDNNQGADGVGNASGDWHCDSTWMGDRVVTKSTRTWVLPSYNNHQYREIKSGSVDGSNANAYFGYSTPWGYFDFNRFHSHWSPRDWQRLINNYWGFRPRSLRVKIFNIQVKEVTVQDSTTTIANNLTSTVQVFTDDDYQLPYVVGNGTEGCLPAFPPQVFTLPQYGYATLNRDNTENPTERSSFFCLEYFPSKMLRTGNNFEFTYNFEEVPFHSSFAPSQNLFKLANPLVDQYLYRFVSTNNTGGVQFNKNLAGRYANTYKNWFPGPMGRTQGWNLGSGVNRASVSAFATTNRMELEGASYQVPPQPNGMTNNLQGSNTYALENTMIFNSQPANPGTTATYLEGNMLITSESETQPVNRVAYNVGGQMTTNNQSSTTAPATGTYNLQEIVPGSVWMERDVYPQGPIWAKIPETGAHFHPSPAMGGFGLKHPPPMMLIKNTPVPGNITSFSDVPVSSFITQYSTGQVTVEMEWELKKENSKRWNPEIQYTNNYNDPQFVDFAPDSTGEYRTTRPIGTRYLTRPL

SEQ ID NO: 856 - protein, 724 aa, Artificial Sequence
  source: /note="Description of Artificial Sequence: Synthetic polypeptide"
MSFVDHPPDWLEEVGEGLREFLGLEAGPPKPKPNQQHQDQARGLVLPGYNYLGPGNGLDRGEPVNRADEVAREHDISYNEQLEAGDNPYLKYNHADAEFQEKLADDTSFGGNLGKAVFQAKKRVLEPFGLVEEGAKTAPTGKRIDDHFPKRKKARTEEDSKPSTSSDAEAGPSGSQQLQIPAQPASSLGADTMSAGGGGPLGDNNQGADGVGNASGDWHCDSTWMGDRVVTKSTRTWVLPSYNNHQYREIKSGSVDGSNANAYFGYSTPWGYFDFNRFHSHWSPRDWQRLINNYWGFRPRSLRVKIFNIQVKEVTVQDSTTTIANNLTSTVQVFTDDDYQLPYVVGNGTEGCLPAFPPQVFTLPQYGYATLNRDNTENPTERSSFLCLEYFPSKMLRTGNNFEFTYNFEEVPFHSSFAPSQNLFKLANPLVDQYLYRFVSTNNTGGVQFNKNLAGRYANTYKNWFPGPMGRTQGWNLGSGVNRASVSAFATTNRMELEGASYQVPPQPNGMTNNLQGSNTYALENTMIFNSQPANPGTTATYLEGNMLITSESETQPVNRVAYNVGGQMATNNQSSTTAPATGTYNLQEIVPGSVWMKRDVYLQGPIWAKIPETGAHFHPSPAMGGFGLKHPPPMMLIKNTPVPGNITSFSDVPVSSFITQYSTGQVTVEMEWELKKENSKRWNPEIQYTNNYNDPQFVDFAPDSTGEYRTTRPIGTRYLTRPL

SEQ ID NO: 857 - protein, 724 aa, Artificial Sequence
  source: /note="Description of Artificial Sequence: Synthetic polypeptide"
MSFVDHPPDWLEEVGEGLREFLGLEAGPPKPKPNQQHQDQARGLVLPGYNYLGPGNGLDRGEPVNRADEVAREHDISYNEQLEAGDNPYLKYNHADAEFQEKLADDTSFGGNLGKAVFQAKKRVLEPFGLVEEGAKTAPTGKRIDDHFPKRKKARTEEDSKPSTPSDAEAGPSGSQQLQIPAQPASSLGADTMSAGGGGPLGDNNQGADGVGNASGDWHCDSTWMGDRVVTKSTRTWVLPSYNNHQYREIKSGSVDGSNANAYFGYSTPWGYFDFNRFHSHWSPRDWQRLINNYWGFRPRSLRVKIFNIQVKEVTVQDSTTTIANNLTSTVQVFTDDDYQLPYVVGNGTEGCLPAFPPQVFTLPQYGYATLNRDNTENPTERSSFFCLEYFPSKMLRTGNNFEFTYNFEEVPFHSSFAPSQNLFKLANPLVDQYLYRFVSTNNTGGVQFNKNLAGRYANTYKNWFPGPMGRTQGWNLGSGVNRASVSAFATTNRMELEGASYQVPPQPNGMTNNLQGSNTYALENTMIFNSQPANPGTTATYLEGNMLITSESETQPVNRVAYNVGGQMATNNQSSTTAPATGTYNLQEIVPGSVWMERDVYLQGPIWAKIPETGAHFHPSPAMGGFGLKHPPPMMLIKNTPVPGNITSFSDVPVSSFITQYSTGQVTVEMEWELKKENSKRWNPEIQYTNNYNDPQFVDFAPDSTGEYRTTRPIGTRYLTRPL

SEQ ID NO: 858 - protein, 724 aa, Artificial Sequence
  source: /note="Description of Artificial Sequence: Synthetic polypeptide"
MSFVDHPPDWLEEVGEGLREFLGLEAGPPKPKPNQQHQDQARGLVLPGYNYLGPGNGLDRGEPVNRADEVAREHDISYNEQLEAGDNPYLKYNHADAEFQEKLADDTSFGGNLGKAVFQAKKRVLEPFGLVEEGAKTAPTGKRIDDHFPKRKKARTEEDSKPSTSSDAEAGPSGSQQLQIPAQPASSLGADTMSAGGGGPLGDNNQGADGVGNASGDWHCDSTWMGDRVVTKSTRTWVLPSYNNHQYREIKSGSVDGSNANAYFGYSTPWGYFDFNRFHSHWSPRDWQRLINNYWGFRPRSLRVKIFNIQVKEVTVQDSTTTIANNLTSTVQVFTDDDYQLPYVVGNGTEGCLPAFPPQVFTLPQYGYATLNRDNTENPTERSSFFCLEYFPSKMLRTGNNFEFTYNFEEVPFHSSFAPSQNLFKLANPLVDQYLYRFVSTNNTGGVQFNKNLAGRYANTHKNWFPGPMGRTQGWNLGSGVNRASVSAFATTNRMELEGASYQVPPQSNGMTNNLRGSNTYALENTMIFNSQPANPGTTATYLEGNMLITSESETQPVNRVAYNVGGQMATNNQSSTTAPATGTYNLQEIVPGSVWMERDVYLQGPIWAKIPETGAHFHPSPAMGGFGLKHPPPMMLIKNTPVPGNITSFSDVPVSSFITQYSTGQVTVEMEWELKKENSKRWNPEIQYTNNYNDPQFVDFAPDSTGEYRTTRPIGTRYLTRPL

SEQ ID NO: 859 - protein, 724 aa, Artificial Sequence
  source: /note="Description of Artificial Sequence: Synthetic polypeptide"
MSFVDHPPDWLEEVGEGLREFLGLEAGPPKPKPNQQHQDQARGLVLPGYNYLGPGNGLDRGEPVNRADEVAREHDISYNEQLEAGDNPYLKYNHADAEFQEKLADDTSFGGNLGKAVFQAKKRVLEPFGLVEEGAKTAPTGKRIDDHFPKRKKARTEEDSKPSTSSDAEAGPSGSQQLQIPAQPASSLGADTMSAGGGGPLGDNNQGADGVGNASGDWHCDSTWMGDRVVTKSTRTWVLPSYNNHQYREIKSGSVDGSNANAYFGYSTPWGYFDFNRFHSHWSPRDWQRLINNYWGFRPRSLRVKIFNIQVKEVTVQDSTTTIANNLTSTVQVFTDDDYQLPYVVGNGTEGCLPAFPPQVFTLPQYGYATLNRDNTENPTERSSFFCLEYFPSKMLRTGNNFEFTYNFEEVPFHSSFAPSQNLFKLANPLVDQYLYRFVSTNNTGGVQFNKNLAGRYANTYKNWFPGPMGRTQGWNLGSGVNRASVSAFATTNRMELEGASYQVPPQPNGMTNNLQGSNTYALENTMIFNSQPANPGTTATYLEGNMLITSESETQPVNRVAYSVGGQMATNNQSSTTAPTTGTYNLQEIVPGSVWMERDVYLQGPIWAKIPETGAHFHPSPAMGGFRLKHPPPMMLIKNTPVPGNITSFSDVPVSSFITQYSTGQVTVEMEWELKKENSKRWNPEIQYTNNYNDPQFVDFAPDSTGEYRTTRPIGTRYLTRPL

SEQ ID NO: 860 - protein, 724 aa, Artificial Sequence
  source: /note="Description of Artificial Sequence: Synthetic polypeptide"
MSFVDHPPDWLEEVGEGLREFLGLEAGPPKPKPNQQHQDQARGLVLPGYNYLGPGNGLDRGEPVNRADEVAREHDISYNEQLEAGDNPYLKYNHADAEFQEKLADDTSFGGNLGKAVFQAKKRVLEPFGLVEEGAKTAPTGKRIDDHFPKRKKARTEEDSKPSTSSDAEAGPSGSQQLQIPAQPASSLGADTMSAGGGGPLGDNNQGADGVGNASGDWHCDSTWMGDRVVTKSTRTWVLPSYNNHQYREIKSGSVDGSNANAYFGYSTPWGYFDFNRFHSHWSPRDWQRLINNYWGFRPRSLRVKIFNIQVKEVTVQDSTTTIANNLTSTVQVFTDDDYQLPYVVGNGTEGCLPAFPPQVFTLPQYGYATLNRDNTENPTERSSFFCLEYFPSKMLRTGNNFEFTYNFEEVPFHSSFAPSQNLFKLANPLVDQYLYRFVSTNNTGGVQFNKNLAGRYANTYKNWFPGPMGRTQGWNLGSGVNRASVSAFAATNRMELEGASYQVPPQPNGMTNNLQGSNTYALENTMIFNSQPANPGTTATYLEGNMLITSESETQPVNRVAYNVGGQMATNNQSSTTAPATGTYNLQEIVPGGVWMERDVYLQGPIWAKIPETGAHFHPSPAMGGFGLKHPPPMMLIKNTPVPGNTTSFSDVPVSSFITQYSTGQVTVEMEWELKKENSKRWNPEIQYTNNYNDPQFVDFAPDSTGEYRTTRPIGTRYLTRPL

SEQ ID NO: 861 - protein, 724 aa, Artificial Sequence
  source: /note="Description of Artificial Sequence: Synthetic polypeptide"
MSFVDHPPDWLEEVGEGLREFLGLEAGPPKPKPNQQHQDQARGLVLPGYNYLGPGNGLDRGEPVNRADEVAREHDISYNEQLEAGDNPYLKYNHADAEFQEKLADDTSFGGNLGKVVFQAKKRVLEPFGLVEEGAKTAPTGKRIDDHFPKRKKARTEEDSKPSTSSDAEAGPSGSQQLQIPAQPASSLGADTMSAGGGGPLGGNNQGADGVGNASGDWHCDSTWMGDRVVTKSTRTWVLPSYNNHQYREIKSGSVDGSNANAYFGYSTPWGYFDFNRFHSHWGPRDWQRLINNYWGFRPRSLRVKIFNIQVKEVTVQDSTTTIANNLTSTVQVFTDDDYQLPYVVGNGTEGCLPAFPPQVFTLPQYGYATLNRDNTENPTERSSFFCLEYFPSKMLRTGNNFEFTYNFEEVPFHSSFAPSQNLFKLANPLVDQYLYRFVSTNNTGGVQFNKNLAGRYANTYKNWFPGPMGRTQGWNLGSGVNRASVSALATTNRMELEGASYQVPPQPNGMTNNLQGSNTYALENTMIFNSQPANPGTTATYLEGNMLITSESETQPVNRVAYNVGGQMATNNQSSTTAPATGTYNLQEIVPGSVWMERDVYLQGPIWAKIPETGAHFHPSPAMGGFGLKHPPPMMLIKNTPVPGNITSFSDVPVSSFITQYSTGQVTVEMEWELKKENSKRWNPEIQYTNNYNDPQFVDFAPDSTGEYRTTRPIGTRYLTRPL

SEQ ID NO: 862 - protein, 723 aa, Artificial Sequence
  source: /note="Description of Artificial Sequence: Synthetic polypeptide"
MSFVDHPPDWLEEVGEGLREFLGLEAGPPKPKPNQQHQDQARGLVLPGYNYLGPGNGLDRGEPVNRADEVAREHDISYNEQLEAGDNPYLKYNHADAEFQEKLADDTSFGGNLGKAVFQAKKRVLEPFGLVEEGAKTAPTGKRIDDHFPKRKKARTEEDSKPSTSSDAEAGPSGSQQLQIPAQPASSLGADTMSAGGGGPLGDNNQGADGVGNASGDWHCDSTWMGDRVVTKSTRTWVLPSYNNHQYREIKSGSVDGSNANAYFGYSTPWGYFDFNRFHSHWSPRDWQRLINNYWGFRPRSLRVKIFNIQVKEVTVQDSTTTIANNLTSTVQVFTDDDYQLPYVVGNGTEGCLPAFPPQVFTLPQYGYATLNRDNTENPTERSSFFCLEYFPSKMLRTGNNFEFTYNFEEVPFHSSFAPSQNLFKLANPLVDQYLYRFVSTNNTGGVQFNKNLAGRYANTYKNWFPGPMGRTQGWNLGSGVNRASVSAFATTNRMELEGASYQVPPQPNGMTNNLQGSNTYALENTMIFNSQPANPGTTATYLEGNMLITSESETQPVNRVAYNVGGQMATNNQSSTTAPATGTYNLQEIVPGSVWMERDVYLQGPIAKIPETGAHFHPSPAMGGFGLKHPPPMMLIKNTPVPGNITSFSDVPVSSFITQYSTGQVTVEMEWELKKENSKRWNPEIQYTNNYNDPQFVDFAPDSTGECRTTRPIGTRYLTRPL

SEQ ID NO: 863 - protein, 724 aa, Artificial Sequence
  source: /note="Description of Artificial Sequence: Synthetic polypeptide"
MSFVDHPPDWLEEVGEGLREFLGLEAGPPKPKPNQQHQDQARGLVLPGYNYLGPGNGLDRGEPVNRADEVAREHDISYNEQLEAGDNPYLKYNHADAEFQEKLADDTSFGGNLGKAVFQAKKRVLEPFGLVEEGAKTAPTGKRIDDHFPKRKKARTEEDSKPSTSSDAEAGPSGSQQLQIPAQPASSLGADTMSAGGGGPLGDNNQGADGVGNASGDWHCDSTWMGDRVVTKSTRTWVLPSYNNHQYREIKSGSVDGSNANAYFGYSTPWGYFDFNRFHSHWSPRDWQRLINNYWGFRPRSLRVKILNIQVKEVTVQDSTTTIANNLTSTVQVFTDDDYQLPYVVGNGTEGCLPAFPPQVFTLPQYGYATLNRDNTENPTERSSFFCLEYFPSKMLRTGNNFEFTYNFEEVPFHSSFAPSQNLFKLANPLVGQYLYRFVSTNNTGGVQFNENLAGRYANTYKNWFPGPMGRTQGWNLGSGVNRASVSAFATTNRMELEGASYQVPPQPNGMTNNLQGSNTYALENTMIFNSQPANPGTTATYLEGNMLITSESETQPVNRVAYNVGGQMATNNQSSTTAPATGTYNLQEIVPGSVWMERDVYLQGPIWAKIPETGAHFHPSPAMGGFGLKHPPPMMLIKNTPVPGNITSFSDVPVSSFITQYSTGQATVEMEWELKKENSKRWNPEIQYTNNYNDPQFVDFAPDSTGEYRTTRPIGTRYLTRPL

SEQ ID NO: 864 - protein, 724 aa, Artificial Sequence
  source: /note="Description of Artificial Sequence: Synthetic polypeptide"
MSFVDHPPDWLEEVGEGLREFLGLEAGPPKPKPNQQHQDQARGLVLPGYNYLGPGNGLDRGEPVNRADEVAREHDISYNEQLEAGDNPYLKYNHADAEFQEKLADDTSFGGNLGKAVFQAKKRVLEPFGLVEEGAKTAPTGKRIDDHFPKRKKARTEEDSKPSTSSDAEAGPSGSQQLQIPAQPASSLGADTMSAGGGGPLGDNNQGADGVGNASGDWHCDSTWMGDRVVTKSTRTWVLPSYNNHQYREIKSGSVDGSNANAYFGYSTPWGYFDFNRFHSHWSPRDWQRLINNYWGFRPRSLRVKIFNIQVKEVTVQDSTTIIANNLTSTVQVFTDDDYQLPYVVGNGTEGCLPAFPPQVFTLPQYGYATLNRDNTENPTERSSFFCLEYFPSKMLRTGNNFEFTYNFEEVPFHSSFAPSQNLFKLANPLVDQYLYRFVSTNNTGGVQFNKNLAGRYANTYKNWFPGPMGRTQGWNLGSGVNRASVSAFATTNRMELEGASYQVPPQPNGMTNNLQGSNTYALENTMIFNSQPANPGTTATYLEGNMLITSESETQPVNRVAYNVGGQMATNNQSSTTAPATGTYNLQEIVPGSVWMERDVYLQGPIWAKIPETGAHFHPSPAMGGFGLKHPPPMMLIKNTPVPGNITSFSDVPVSSFITQYSTGQVTVEMEWELKKENSKRWNPEIQYTNNYNDPQFVDFAPDSTGEYRTTRPIGTRYLTRPL

SEQ ID NO: 865 - protein, 724 aa, Artificial Sequence
  source: /note="Description of Artificial Sequence: Synthetic polypeptide"
MSFVDHPPDWLEEVGEGLREFLGLEAGPPKPKPNQQHQDQARGLVLPGYNYLGPGNGLDRGEPVNRADEVAREHDISYNEQLEAGDNPYLKYNHADAEFQEKLADDTSFGGNLGKAVFQAKKRVLEPFGLVEEGAKTAPTGKRIDDHFPKRKKARTEEDSKPSTSSDAEAGPSGSQQLQIPAQPASSLGADTMSAGGGGPLGDNNQGADGVGNASGDWHCDSTWMGDRVVTKSTRTWVLPSYNNHQYREIKSGSVDGSNANAYFGYSTPWGYFDFNRFHSHWSPRDWQRLINNYWGFRPRSLRVKIFNIQVKEVTVQDSTTTIANNLTSTVQVFTDDDYQLPYVVGNGTEGCLPAFPPQVFTLPQYGYATLNRDNTENPTERSSFFCLEYFPSKMLRTGNNFEFTYNFEEVPFHSSFAPSQNLFKLANPLVDQYLYRFVSTNNTGGVQFNKNLAGRYANTYKNWFPGPMGRTQGWNLGSGVNRASVSAFATTNRMELEGASYQVPPQPNGMTNNLQGSNTYALENTMIFNSQPANPGTTATYLEGNMLITSESETQPVNRVAYNVGGQMATNNQSSTTAPATGTYNLQEIVPGSVWMERDVYLQGPIWAKIPETGAHFHPSPAMGGFGLKHPPPMMLIKNTPVPGNITSLSDVPVSSFITQYSTGQVTVEMEWELKKENSKRWNPEIQYTNNYNDPQFVDFAPDSTGEYRTTRPIGTRYLTRPL

SEQ ID NO: 866 - protein, 724 aa, Artificial Sequence
  source: /note="Description of Artificial Sequence: Synthetic polypeptide"
MSFVDHPPDWLEEVGEGLREFLGLEAGPPKPKPNQQHQDQARGLVLPGYNYLGPGNGLDRGEPANRADEVAREHDISYNEQLEAGDNPYLKYNHAGAEFQEKLADDTSFGGNLGKAVFQAKKRVLEPFGLVEEGAKTAPTGKRIDDHFPKRKKARTEEDSKPSTSSDAEAGPSGSQQLQIPAQPASSLGADTMSAGGGGPLGDNNQGADGVGNASGDWHCDSTWMGDRVVTKSTRTWVLPGYNNHQYREIKSGSVDGSNANAYFGYSTPWGYFDFNRFHSHWSPRDWQRLINNYWGFRPRSLRVKIFNIQVKEVTVQDSTTTIANNLTSTVQVFTDDDYQLPYVVGNGTEGCLPAFPPQVFTLPQYGYATLNRDNTENPTERSSFFCLEYFPSKMLRTGNNFEFTYNFEEVPFHSSFAPSQNLFKLANPLVDQYLYRFVSTNNTGGVQFNKNLAGRYANTYKNWFPGPMGRTQGWNLGSGVNRASVSAFATTNRMELEGASYQVPPQPNGMTNNLQGSNTYALENTMIFNSQPANPGTTATYLEGNMLITSESETQPVNRVAYNVGGQMATNNQSSTTAPATGTYNLQEIVPGSVWMERDVYLQGPIWAKIPETGAHFHPSPAMGGFGLKHPPPMMLIKNTPVPGNITSFSDVPVSSFITQYSTGQVTVEMEWELKKENSKRWNPEIQYTNNYNDPQFVDFAPDSTGEYRTTRPIGTRYLTRPL

SEQ ID NO: 867 - protein, 724 aa, Artificial Sequence
  source: /note="Description of Artificial Sequence: Synthetic polypeptide"
MSFVDHPPDWLEEVGEGLREFLGLEAGPPKPKPNQQHQDQARGLVLPGYNYLGPGNGLDRGEPVNRADEVAREHDISYNEQLEAGDNPYLKYNHADAEFQEKLADDTSFGGNLGKAVFQAKKRVLEPFGLVEEGAKTAPTGKRIDDHFPKRKKARTEEDSKPPTSSDAEAGPSGSQQLQIPAQPASSLGADTMSAGGGGPLGDNNQGADGVGNASGDWHCDSTWMGDRVVTKSTRTWVLPSYNNHQYREIKSGSVDGSNANAYFGYSTPWGYFDFNRFHSHWSPRDWQRLINNYWGFRPRSLRVKIFNIQVKEVTVQDSATTIANNLTSTVQVFTDDDYQLPYVVGNGTEGCLPAFPPQVFTLPQYGYATLNRDNTENPTERSSFFCLEYFPSKMLRTGNNFEFTYNFEEVPFHSSFAPSQNLFKLANPLVDQYLYRFVSTNNTGGVQFNKNLAGRYANTYKNWFPGPMGRTQGWNLGSGVNRASVSAFATTNRMELEGASYQVPPQPNGMTNNLQGSNTYALENTMIFNSQPANPGTTATYLEGNMLITSESETQPVNRVAYNVGGQMATNNQSSTTAPATGTYNLQEIVPGSVWMERDVYLQGPIWAKIPETGAHFHPSPAMGGFGLKHPPPMMLIKNTPVPGNITSFSDVPVSSFITQYSTGQVTVEMEWELKKENSKRWNPEIQYTNNYNDPQFVDFAPDSTGEYRTTRPIGTRYLTRPL

SEQ ID NO: 868 - protein, 724 aa, Artificial Sequence
  source: /note="Description of Artificial Sequence: Synthetic polypeptide"
MSFVDHPPDWLEEVGEGLREFLGLEAGPPKPKPNQQHQDQARGLVLPGYNYLGPGNGLDRGEPVNRADEVAREHDISYNEQLEAGDNPYLKYNHADAEFQEKLADDTSFGGNLGKAVFQAKKRVLEPFGLVEEGAKTAPTGKRIDDHFPKRKKARTEEDSKPSTSSDAEAGPSGSQQPQIPAQPASSLGADTMSAGGGGPLGDNNQGADGVGNASGDWHCDSTWMGDRVVTKSTRTWVLPSYNNHQYREIKSGSVDGSNANAYFGYSTPWGYFDFNRFHSHWSPRDWQRLINNYWGFRPRSLRVKIFNIQVKEVTVQDSTTTIANNLTSTVQVFTDDDYQLPYVVGNGTEGCLPAFPPQVFTLPQYGYATLNRDNTENPTERSSFFCLEYFPSKMLRTGNNFEFTYNFEEVPFHSSFAPSQNLFKLANPLVDQYLYRFVSTNNTGGVQFNKNLAGRYANTYKNWFPGPMGRTQGWNLGSGVNRASVSAFATTNRMELEGASYQVPPQPNGMTNNLQGSNTYALENTMIFNSQPANPGTTATYLEGNMLITSESETQPVNRVAYNVGGQMATNNQSSTTAPATGTYNLQEIVPGSVWMERDVYLQGPIWAKIPETGAHFHPSPAMGGFGLKHPPPMMLIKNTPAPGNITSFSDVPVSSFITQYSTGQVTVEMEWELKKENSKRWNPEIQYTNNYNDPQFVDFAPDSTGEYRTTRPIGTRYLTRPL

SEQ ID NO: 869 - protein, 724 aa, Artificial Sequence
  source: /note="Description of Artificial Sequence: Synthetic polypeptide"
MSFVDHPPDWLEEVGEGLREFLGLEAGPPKPKPNQQHQDQARGLVLPGYNYLGPGNGLDRGEPVNRADEVAREHDISYNEQLEAGDNPYLKYNHADAEFQEKLADDTSFGGNLGKAVFQAKKRVLEPFGLVEEGAKTAPTGKRIDDHFPKRKKARTEEDSKPPTSSDAEAGPSGSQQLQIPAQPASSLGADTMSAGGGGPLGDNNQGADGVGNASGDWHCDSTWMGDRVVTKSTRTWVLPSYNNHQYREIKSGSVDGSNANAYFGYSTPWGYFDFNRFHSHWSPRDWQRLINNYWGFRPRSLRVKIFNIQVKEVTVQDSTTTIANNLTSTVQVFTDDDYQLPYVVGNGTEGCLPAFPPQVFTLPQYGYATLNRDNTENPTERSSFFCLEYFPSKMLRTGNNFEFTYNFEEVPFHSSFAPSQNLFKLANPLVDQYLYRFVSTNNTGGVQFNKNLAGRYANTYKNWFPGPMGRTQGWNLGSGVNRASVSAFATTNRMELEGASYQVPPQPNGMTNNLQGSNTYALENTMIFNSQPANPGTTATYLEGNMLITSESETQPVNRVAYNVGGQMATNNQSSTTAPATGTYNLQEIVPGSVWMERDVYLQGPIWAKIPETGAHFHPSPAMGGFGLKHPPPMMLIKNTPVPGNITSFSDVPVSSFITQYSTGQVTVEMEWELKKENSKRWNPEIQYTNNYNDPQFVDFAPDSTGEYRTTRPIGTRYLTRPL

SEQ ID NO: 870 - protein, 724 aa, Artificial Sequence
  source: /note="Description of Artificial Sequence: Synthetic polypeptide"
MSFVDHPPDWLEEVGEGLREFLGLEAGPPKPKPNQQHQDQARGLVLPGYNYLGPGNGLDRGEPVNRADEVAREHDISYNEQLEAGDNPYLKYNHADAEFQEKLADDTSFGGNLGKAVFQAKKRVLEPFGLVEEGAKTAPTGKRIDDHFPKRKKARTEEDSKPPTSSDAEAGPSGSQQLQIPAQPASSLGADTMSAGGGGPLGDNNQGADGVGNASGDWHCDSTWMGDRVVTKSTRTWVPPSYNNHQYREIKSGSVDGSNANAYFGYSTPWGYFDFNRFHSHWSPRDWQRLINNYWGFRPRSLRVKIFNIQVKEVTVQDSTTTIANNLTSTVQVFTDDDYQLPYVVGNGTEGCLPAFPPQVFTLPQYGYATLNRDNTENPTERSSFFCLEYFPSKMLRTGNNFEFTYNFEEVPFHSSFAPSQNLFKLANPLVDQYLYRFVSTNNTGGVQFNKNLAGRYANTYKNWFPGPMGRTQGWNLGSGVNRASVSAFATTNRMELEGASYQVPPQPNGMTNNLQGSNTYALENTMIFNSQPANPGTTATYLEGNMLITSESETQPVNRVAYNVGGQMATNNQSSTTAPATGTYNLQEIVPGSVWMERDVYLQGPIWAKIPETGAHFHPSPAMGGFGLKHPPPMMLIKNTPVPGNITSFSDVPVSSFITQYSTGQVAVEMEWELKKENSKRWNPEIQYTNNYNDPQFVDFAPDSTGEYRTTRPIGTRYLTRPL

SEQ ID NO: 871 - protein, 724 aa, Artificial Sequence
  source: /note="Description of Artificial Sequence: Synthetic polypeptide"
MSFVDHPPDWLEEVGEGLREFLGLEAGPPKPKPNQQHQDQARGLVLPGYNYLGPGNGLDRGEPVNRADEVAREHDISYNEQLEAGDNPYLKYNHADAEFQEKLADDTSFGGNLGKAVFQAKKRVLEPFGLVEEGAKTAPTGKRIDDHFPKRKKARTEEDSKPSTSSDAEAGPSGSQQLQIPAQPASSLGADTMSAGGGGPLGDNNQGADGVGNASGDWHCDSTWMGDRVVTKSTRTWVLPSYNNHQYREIKSGSVDGSNANAYFGYSTPWGYFDFNRFHSHWSPRDWQRLINNYWGFRPRSLRVKIFNIQVKEVTVQDSTTTIANNLTSTVQVFTDDDYQLPYVVGNGTEGCLPAFPPQVFTLPQYGYATLNRDNTENPTERSSFFCLEYFPSKMLRTGNNFEFTYNFEEVPFHSSFAPSQNLFKLANPLVDQYLYRFVSTNNTGGVQFNKNLAGRYANTYKNWFPGPMGRTQGWNLGSGVNRASVSAFATTNRMELEGASYQVPPQPNGMTNNLQGSNTYALENTMIFNSQPANPGTTATYLEGNMLITSESETQPVNRVAYNVGGQMATNNQSSTTAPATGTYNLQEIVPGSVWMERDVYLQGPIWAKIPETGAHFHPSPAMGGFGLKHPPPMMLIKNTPAPGNITSFSDVPVSSFITQYSTGQVTVEMEWELKKENSKRWNPEIQYTNNYNDPQFVDFAPDSTGEYRTTRPIGTRYLTRPL

SEQ ID NO: 872 - protein, 724 aa, Artificial Sequence
  source: /note="Description of Artificial Sequence: Synthetic polypeptide"
MSFVDHPPDWLEEVGEGLREFLGLEAGPPKPKPNQQHQDQARGLVLPGYNYLGPGNGLDRGEPVNRADEVAREHDISYNEQLEAGDNPYLKYNHADAEFQEKLADDTSFGGNLGKAVFQAKKRVLEPFGLAEEGAKTAPTGKRIDDHFPKRKKARTEEDSKPSTSSDAEAGPSGSQQLQIPAQPASSLGADTMSAGGGGPLGDNNQGADGVGNASGDWHCDSTWMGDRVVTKSTRTWVLPSYNNHQYREIKSGSVDGSNANAYFGYSTPWGYFDFNRFHSHWSPRDWQRLINNYWGFRPRSLRAKIFNIQVKEVTVQDSTTTIANNLTSTVQVFTDDDYQLPYVVGNGTEGCLPAFPPQVFTLPQYGYATLNRDNTENPTERSSFFCLEYFPSKMLRTGNNLEFTYNFEEVPFHSSFAPSQNLFKLANPLVDQYLYRFVSTNNTGGVQFNKNLAGRYANTYKNWFPGPMGRTQGWNLGSGVNRASVSAFATTNRMELEGASYQVPPQPNGMTNNLQGSNTYALENTMIFNSQPANPGTTATYLEGNMLITSESETQPVNRVVHNVGGQMATNNQSSTTAPATGTYNLQEIVPGSVWMERDVYLQGPIWAKIPETGAHFHPSPAMGGFGLKHPPPMMLIKNTPVPGNITSFSDVPVSSFITQYSTGQVTVEMEWELKKENSKRWNPEIQYTNNYNDPQFVDFAPDSTGEYRTTRPIGTRYLTRPL

SEQ ID NO: 873 - protein, 724 aa, Artificial Sequence
  source: /note="Description of Artificial Sequence: Synthetic polypeptide"
MSFVDHPPDWLEEVGEGLREFLGLEAGPPKPKPNQQHQDQARGLVLPGYNYLGPGNGLDRGEPVNRADEVAREHDISYNEQLEAGDNPYLKYNHADAEFQEKLADDTSFGGNLGKAVFQAKKRVLEPFGLVEEGAKTAPTGKRIDDHFPKRKKARTEEDSKPSTSSDAEAGPSGSQQLQIPAQPASSLGADTMSAGGGGPLGDNNQGADGVGNASGDWHCDSTWMGDRVVTKSTRTWVLPSYNNHQYREIKSGSVDGGNANAYFGYSTPWGYFDFNRFHSHWSPRDWQRLINNYWGFRPRSLRVKIFNIQVKEVTVQDSTTTIANNLTSTVQVFTDDDYQLPYVVGNGTEGCLPAFPPQVFTLPQYGYATLNRDNTENPTERSSFFCLEYFPSKMLRTGNNFEFTYNFEEVPFHSSFAPSQNLFKLANPLVDQYLYRFVSTNNTGGVQFNKNLAGRYANTYKNWFPGPMGRTQGWNLGSGVNRASVSAFATTNRMELEGASYQVPPQPNGMTNNLQGSNTYALENTMIFNSQPANPGTTATYLEGNMLITSESETQPVNRVAYNVGGQMATNNQSSTTAPATGTYNLQEIVPGSVWMERDVYLQGPIWAKIPETGAHFHPSPAMGGFGLKHPPPMMLIKNTPAPGNITSFSDVPVSSFITQYSTGQVTVEMEWELKKGNSKRWNPEIQYTNNYNDPQFVDFAPDSTGEYRTTRPIGTRYLTRPL

SEQ ID NO: 874 - protein, 724 aa, Artificial Sequence
  source: /note="Description of Artificial Sequence: Synthetic polypeptide"
MSFVDHPPDWLEEVGEGLREFLGLEAGPPKPKPNQQHQDQARGLVLPGYNYLGPGNGLDRGEPVNRADEVAREHDISYNEQLEAGDNPYLKYNHADAEFQEKLADDTSFGGNLGKAVFQAKKRVLEPFGLVEEGAKTAPTGKRIDDHFPKRKKARTEEDSKPSTSSDAEAGPSGSQQLQIPAQPASSLGADTMSAGGGGPLGDNNQGADGVGNASGDWHCDSTWMGDRVVTKSTRTWVLPSYNNHQYREIKSGSVDGSNANAYFGYSTPWGYFDFNRFHSHWSPRDWQRLINNYWGFRPRSLRVKIFNIQVKEVTVQDSTTTIANNLTSTVQVFTDDDYQLPYVVGNGTEGCLPAFPPQVFTLPQYGYATLNRDNTENPTERSSFFCLEYFPSKMLRTGNNFEFTYNFEEVPFHSSFAPSQNLFKLANPLVDQYLYRFVSTNNTGGVQFNKNLAGRYANTYKNWFPGPMGRTQGWNLGSGVNRASVSAFATTNRMELEGASYQVPPQPNGMTNNLQGSNTYALENTMIFNSQPANPGTTATYLEGNMLITSESETQPVNRVAYNVGGQMATNNQSSTTAPATGTYNLQEIVPGSVWMERDVYLQGPIWAKIPETGVHFHPSPAMGGFGLKHPPPMMLIKNTPVPGNITSFSDVPVSSFITQYSTGQVTVEMEWELKKENSKRWNPEIQYTNNYNDPQFVDFAPDSTGEYRTTRPIGTRYLTRPL

SEQ ID NO: 875 - protein, 724 aa, Artificial Sequence
  source: /note="Description of Artificial Sequence: Synthetic polypeptide"
  MOD_RES (551)..(551): Any naturally occurring amino acid
MSFVDHPPDWLEEVGEGLREFLGLEAGPPKPKPNQQHQDQARGLVLPGYNYLGPGNGLDRGEPVNRADEVAREHDISYNEQLEAGDNPYLKYNHADAEFQEKLADDTSFGGNLGKAVFQAKKRVLEPFGLVEEGAKTAPTGKRIDDHFPKRKKARTEEDSKPSTSSDAEAGPSGSQQLQIPAQPASSLGADTMSAGGGGPLGDNNQGADGVGNASGDWHCDSTWMGDRVVTKSTRTWVLPSYNNHQYREIKSGSVDGSNANAYFGYSTPWGYFDFNRFHSHWSPRDWQRLINNYWGFRPRSLRVKIFNIQVKEVTVQDSTTTIANNLTSTVQVFTDDDYQLPYVVGNGTEGCLPAFPPQVFTLPQYGYATLNRDNTENPTERSSFFCLEYFPSKMLRTGNNFEFTYNFEEVPFHSSFAPSQNLFKLANPLVDQYLYRFVSTNNTGGVQFNKNLAGRYANTYKNWFPGPMGRTQGWNLGSGVNRASVSAFATTNRMELEGASYQVPPQPNGMTNNLQGSNTYALENTMIFNSQPANPGTTATYLEGSMLITXESETQPVNRVAYNVGGQMATNNQSSTTAPATGTYNLQEIVPGSVWMERDVYLQGPIWAKIPETGAHFHPSPAMGGFGLKHPPPMMLIKNTPVPGNITSFSDVPVSSFITQYSTGQVTVEMEWELKKENSKRWNPEIQYTNNYNDPQFVDFAPDSTGEYRTTRPIGTRYLTRPL

SEQ ID NO: 876 - protein, 736 aa, Artificial Sequence; identical to SEQ ID NO: 50
  source: /note="Description of Artificial Sequence: Synthetic polypeptide"

SEQ ID NO: 877 - protein, 734 aa, Artificial Sequence; identical to SEQ ID NO: 68
  source: /note="Description of Artificial Sequence: Synthetic polypeptide"

SEQ ID NO: 878 - protein, 723 aa, Artificial Sequence
  source: /note="Description of Artificial Sequence: Synthetic polypeptide"
MSFVDHPPDWLEEVGEGLREFLGLEAGPPKPKPNQQHQDQARGLVLPGYNYLGPGNGLDRGEPVNRADEVAREHDISYNEQLEAGDNPYLKYNHADAEFQEKLADDTSFGGNLGKAVFQAKKRVLEPFGLVEEGAKTAPTGKRIDDHFPKRKKARTEEDSKPSTSSDAEAGPSGSQQLQIPAQPASSLGADTMSAGGGPLGDNNQGADGVGNASGDWHCDSTWMGDRVVTKSTRTWVLPSYNNHQYREIKSGSVDGSNANAYFGYSTPWGYFDFNRFHSHWSPRDWQRLINNYWGFRPRSLRVKIFNIQVKEVTVQDSTTTIANNLTSTVQVFTDDDYQLPYVVGNGTEGCLPAFPPQVFTLPQYGYATLNRDNTENPTERSSFFCLEYFPSKMLRTGNNFEFTYNFEEVPFHSSFAPSQNLFKLANPLVDQYLYRFVSTNNTGGVQFNKNLAGRYANTYKNWFPGPMGRTQGWNLGSGVNRASVSAFATTNRMELEGASYQVPPQPNGMTNNLQGSNTYALENTMIFNSQPANPGTTATYLEGNMLITSESETQPVNRVAYNVGGQMATNNQSSTTAPATGTYNLQEIVPGSVWMERDVYLQGPIWAKIPETGAHFHPSPAMGGFGLKHPPPMMLIKNTPVPGNITSFSDVPVSSFITQYSTGQVTVEMEWELKKENSKRWNPEIQYTNNYNDPQFVDFAPDSTGEYRTTRPIGTRYLTRPL

SEQ ID NO: 879 - protein, 534 aa, Artificial Sequence
  source: /note="Description of Artificial Sequence: Synthetic polypeptide"
MAEGGGGAMGDSSGGADGVGNASGNWHCDSQWMGNTVITKTTRTWVLPSYNNHIYKAITSGTSQDANVQYAGYSTPWGYFDFNRFHCHFSPRDWQRLINNHWGIRPKSLKFKIFNVQVKEVTTQDQTKTIANNLTSTIQVFTDDEHQLPYVLGSATEGTMPPFPSDVYALPQYGYCTMHTNQNGARFNDRSAFYCLEYFPSQMLRTGNNFEFTFDFEEVPFHSMFAHSQDLDRLMNPLVDQYLWNFNEVDSSRNAQFKKAVKGAYGTMGRNWLPGPKFLDQRVRAYTGGTDNYANWNIWSNGNKVNLKDRQYLLQPGPVSATYTEGEASSLPAQNILGIAKDPYRSGSTTAGISDIMVTEEQEVAPTNGVGWKPYGRTVTNEQNTTTAPTSSDLDVLGALPGMVWQNRDIYLQGPIGAKIPKTDGKFHPSPNLGGFGLHNPPPQVFIKNTPVPADPPVEYVHQKWNSYITQYSTGQCTVEMVWELRKENSKRWNPEIQFTSNFSNRTSIMFAPNETGGYVEDRLIGTRYLTQNL

SEQ ID NO: 880 - protein, 554 aa, Artificial Sequence
  source: /note="Description of Artificial Sequence: Synthetic polypeptide"
MTSVNSAEASTGAGGGGSNPVKSMWSEGATFSANSVTCTFSRQFLIPYDPEHHYKVFSPAASSCHNASGKEAKVCTISPIMGYSTPWRYLDFNALNLFFSPLEFQHLIENYGSIAPDALTVTISEIAVKDVTDKTGGGVQVTDSTTGRLCMLVDHEYKYPYVLGQGQDTLAPELPIWVYFPPQYAYLTVGDVNTQGISGDSKKLASEESAFYVLEHSSFQLLGTGGTATMSYKFPPVPPENLEGCSQHFYEMYNPLYGSRLGVPDTLGGDPKFRSLTHEDHAIQPQNFMPGPLVNSVSTKEGDSFNTGAGKALTGLSTGTSQNTRISLRPGPVSQPYHHWDTDKYVTGINAISHGQTTYGNAEDKEYQQGVGRFPNEKEQLKQLQGLNMHTYFPNKGTQQYTDQIERPLMVGSVWNRRALHYESQLWSKIPNLDDSFKTQFAALGGWGLHQPPPQIFLKILPQSGPIGGIKSMGITTLVQYAVGIMTVTMTFKLGPRKATGRWNPQPGVYPPHAAGHLPYVLYDPTATDAKQHHRHGYEKPEELWTAKSRVHPL

SEQ ID NO: 881 - protein, 587 aa, Artificial Sequence
  source: /note="Description of Artificial Sequence: Synthetic polypeptide"
MSDGTSQPDGGNAVHSAARVERAADGPGGSGGGGSGGGGVGVSTGSYDNQTHYRFLGDGWVEITALATRLVHLNMPKSENYCRIRVHNTTDTSVKGNMAKDDAHEQIWTPWSLVDANAWGVWLQPSDWQYICNTMSQLNLVSLDQEIFNVVLKTVTEQDSGGQAIKIYNNDLTACMMVAVDSNNILPYTPAANSMETLGFYPWKPTIASPYRYYFCVDRDLSVTYENQEGTIEHNVMGTPKGMNSQFFTIENTQQITLLRTGDEFATGTYYFDTNPVKLTHTWQTNRQLGQPPLLSTFPEADTDAGTLTAQGSRHGATQMEVNWVSEAIRTRPAQVGFCQPHNDFEASRAGPFAAPKVPADVTQGMDREANGSVRYSYGKQHGENWAAHGPAPERYTWDETNFGSGRDTRDGFIQSAPLVVPPPLNGILTNANPIGTKNDIHFSNVFNSYGPLTTFSHPSPVYPQGQIWDKELDLEHKPRLHITAPFVCKNNAPGQMLVRLGPNLTDQYDPNGATLSRIVTYGTFFWKGKLTMRAKLRANTTWNPVYQVSVEDNGNSYMSVTKWLPTATGNMQSVPLITRPVARNTY

SEQ ID NO: 882 - protein, 584 aa, Artificial Sequence
  source: /note="Description of Artificial Sequence: Synthetic polypeptide"
MSDGAVQPDGGQPAVRNERATGSGNGSGGGGGGGSGGVGISTGTFNNQTEFKFLENGWVEITANSSRLVHLNMPESENYKRVVVNNMDKTAVKGNMALDDIHVEIVTPWSLVDANAWGVWFNPGDWQLIVNTMSELHLVSFEQEIFNVVLKTVSESATQPPTKVYNNDLTASLMVALDSNNTMPFTPAAMRSETLGFYPWKPTIPTPWRYYFQWDRTLIPSHTGTSGTPTNVYHGTDPDDVQFYTIENSVPVHLLRTGDEFATGTFFFDCKPCRLTHTWQTNRALGLPPFLNSLPQSEGATNFGDIGVQQDKRRGVTQMGNTDYITEATIMRPAEVGYSAPYYSFEASTQGPFKTPIAAGRGGAQTDENQAADGDPRYAFGRQHGQKTTTTGETPERFTYIAHQDTGRYPEGDWIQNINFNLPVTNDNVLLPTDPIGGKTGINYTNIFNTYGPLTALNNVPPVYPNGQIWDKEFDTDLKPRLHINAPFVCQNNCPGQLFVKVAPNLTNQYDPDASANMSRIVTYSDFWWKGKLVFKAKLRASHTWNPIQQMSINVDNQFNYVPNNIGAMKIVYEKSQLAPRKLY

SEQ ID NO: 883 - protein, 548 aa, Artificial Sequence
  source: /note="Description of Artificial Sequence: Synthetic polypeptide"
GVGISTGTFNNQTEFKFLENGWVEITANSSRLVHLNMPESENYRRVVVNNMDKTAVNGNMALDDIHAQIVTPWSLVDANAWGVWFNPGDWQLIVNTMSELHLVSFEQEIFNVVLKTVSESATQPPTKVYNNDLTASLMVALDSNNTMPFTPAAMRSETLGFYPWKPTIPTPWRYYFQWDRTLIPSHTGTSGTPTNIYHGTDPDDVQFYTIENSVPVHLLRTGDEFATGTFFFDCKPCRLTHTWQTNRALGLPPFLNSLPQSEGATNFGDIGVQQDKRRGVTQMGNTNYITEATIMRPAEVGYSAPYYSFEASTQGPFKTPIAAGRGGAQTDENQAADGNPRYAFGRQHGQKTTTTGETPERFTYIAHQDTGRYPEGDWIQNINFNLPVTNDNVLLPTDPIGGKTGINYTNIFNTYGPLTALNNVPPVYPNGQIWDKEFDTDLKPRLHVNAPFVCQNNCPGQLFVKVAPNLTNEYDPDASANMSRIVTYSDFWWKGKLVFKAKLRASHTWNPIQQMSINVDNQFNYVPSNIGGMKIVYEKSQLAPRKLY

SEQ ID NO: 884 - protein, 736 aa, Artificial Sequence; identical to SEQ ID NO: 112
  source: /note="Description of Artificial Sequence: Synthetic polypeptide"

SEQ ID NO: 885 - protein, 736 aa, Artificial Sequence; identical to SEQ ID NO: 107
  source: /note="Description of Artificial Sequence: Synthetic polypeptide"

SEQ ID NO: 886 - protein, 736 aa, Artificial Sequence
  source: /note="Description of Artificial Sequence: Synthetic polypeptide"
MAADGYLPDWLEDTLSEGIRQWWKLKPGPPPPKPAERHKDDSRGLVLPGYKYLGPFNGLDKGEPVNEADAAALEHDKAYDRQLDSGDNPYLKYNHADAEFQERLKEDTSFGGNLGRAVFQAKKRVLEPLGLVEEPVKTAPGKKRPVEHSPVEEPDSSSGTGKAGQQPARKRLNFGQTGDADSVPDPQPLGQPPAAPSGLGTNTMATGSGAPMADNNEGADGVGNSSGNWHCDSTWMGDRVITTSTRTWALPTYNNHLYKQISSQSGASNDNHYFGYSTPWGYFDFNRFHCHFSPRDWQRLINNNWGFRPKRLNFKLFNIQVKEVTQNDGTTTIANNLTSTVQVFTDSEYQLPYVLGSAHQGCLPPFPADVFMVPQYGYLTLNNGSQAVGRSSFYCLEYFPSQMLRTGNNFTFSYTFEDVPFHSSYAHSQSLDRLMNPLIDQYLYYLSRTNTPSGTTTQSRLQFSQAGASDIRDQSRNWLPGPCYRQQRVSKTSADNNNSEYSWTGATKYHLNGRDSLVNPGPAMASHKDDEEKFFPQSGVLIFGKQGSEKTNVDIEKVMITDEEEIRTTNPVATEQYGSVSTNLQRGNRQAATADVNTQGVLPGMVWQDRDVYLQGPIWAKIPHTDGHFHPSPLMGGFGLKHPPPQILIKNTPVPANPSTTFSAAKFASFITQYSTGQVSVEIEWELQKENSKRWNPEIQYTSNYNKSVNVDFTVDTNGVYSEPRPIGTRYLTRNL

SEQ ID NO: 887 - protein, 736 aa, Artificial Sequence
  source: /note="Description of Artificial Sequence: Synthetic polypeptide"
MAADGYLPDWLEDNLSEGIREWWDLKPGAPKPKANQQKQDDGRGLVLPGYKYLGPFNGLDKGEPVNAADAAALEHDKAYDQQLKAGDNPYLRYNHADAEFQERLQEDTSFGGNLGRAVFQAKKRVLEPFGLVEEGAKTAPGKKRPVEQSPQEPDSSSGIGKTGQQPAKKRLNFGQTGDSESVPDPQPLGEPPATPAAVGPTTMASGGGAPMADNNEGADGVGNASGNWHCDSTWLGDRVITTSTRTWALPTYNNHLYKQISSASTGASNDNHYFGYSTPWGYFDFNRFHCHFSPRDWQRLINNNWGFRPKRLNFKLFNVQVKEVTTNDGVTTIANNLTSTVQVFSDSEYQLPYVLGSAHQGCLPPFPADVFMIPQYGYLTLNNGSQAVGRSSFYCLEYFPSQMLRTGNNFTFSYTFEDVPFHSSYAHSQSLDRLMNPLIDQYLYYLNRTQDQSGSAQNKDLLFSRGSPAGMSVQPKNWLPGPCYRQQRVSKTKTDNNNSNFTWTGASKYNLNGRESIINPGTAMASHKDDKNKFFPMSGVMIFGKESAGASNTALDNVMITDEEEIKATNPVATERFGTVAVNLQSSSTDPATGDVHVMGALPGMVWQDRDVYLQGPIWAKIPHTDGHFHPSPLMGGFGLKNPPPQILIKNTPVPANPPAEFSATKFASFITQYSTGQVSVEIEWELQKENSKRWNPEVQYTSNYAKSANVDFTVDNNGLYTEPRPIGTRYLTRPL

SEQ ID NO: 888 - protein, 737 aa, Artificial Sequence
  source: /note="Description of Artificial Sequence: Synthetic polypeptide"
MAADGYLPDWLEDTLSEGIRQWWKLKPGPPPPKPAERHKDDSRGLVLPGYKYLGPGNGLDKGEPVNAADAAALEHDKAYDQQLKAGDNPYLKYNHADAEFQERLKEDTSFGGNLGRAVFQAKKRVLEPLGLVEEGAKTAPGKKRPVEPSPQRSPDSSTGIGKKGQQPARKRLNFGQTGDSESVPDPQPLGEPPATPAAVGPTTMASGGGAPMADNNEGADGVGNASGNWHCDSTWLGDRVITTSTRTWALPTYNNHLYKQISSASTGASNDNHYFGYSTPWGYFDFNRFHCHFSPRDWQRLINNNWGFRPKRLNFKLFNIQVKEVTTNDGVTTIANNLTSTVQVFSDSEYQLPYVLGSAHQGCLPPFPADVFMIPQYGYLTLNNGSQAVGRSSFYCLEYFPSQMLRTGNNFTFSYTFEDVPFHSSYAHSQSLDRLMNPLIDQYLYYLNRTQNQSGSAQNKDLLFSRGSPAGMSVQPKNWLPGPCYRQQRVSKTKTDNNNSNFTWTGASKYNLNGRESIINPGTAMASHKDDKDKFFPMSGVMIFGKESAGASNTALDNVMITDEEEIKATNPVATERFGTVAVNLQSSSTDPATEDVHVMGALPGMVWQDRDVYLQGPIWAKIPHTDGHFHPSPLMGGFGLKNPPPQILIKNTPVPANPPAEFSATKFASFITQYSTGQVSVEIEWELQKENSKRWNPEVQYTSNYAKSANVDFTVDNNGLYTEPRPIGTRYLTRNL

SEQ ID NO: 889 - protein, 736 aa, Artificial Sequence
  source: /note="Description of Artificial Sequence: Synthetic polypeptide"
MAADGYLPDWLEDNLSEGIREWWDLKPGAPKPKANQQKQDDGRGLVLPGYKYLGPFNGLDKGEPVNAADAAALEHDKAYDQQLKAGDNPYLRYNHADAEFQERLQEDTSFGGNLGRAVFQAKKRVLEPFGLVEEGAKTAPGKKRPVEQSPQEPDSSSGIGKTGQQPAKKRLNFGQTGDSESVPDPQPLGEPPATPAAVGPTTMASGGGAPMADNNEGADGVGNASGNWHCDSTWLGDRVITTSTRTWALPTYNNHLYKQISSASTGASNDNHYFGYSTPWGYFDFNRFHCHFSPRDWQRLINNNWGFRPKRLNFKLFNVQVKEVTTNDGVTTIANNLTSTVQVFSDSEYQLPYVLGSAHQGCLPPFPADVFMIPQYGYLTLNNGSQAVGRSSFYCLEYFPSQMLRTGNNFTFSYTFEDVPFHSSYAHSQSLDRLMNPLIDQYLYYLNRTQDQSGSAQNKDLLFSRGSPAGMSVQPKNWLPGPCYRQQRVSKTKTDNNNSNFTWTGASKYNLNGRESIINPGTAMASHKDDKNKFFPMSGVMIFGKESAGASNTALDNVMITDEEEIKATNPVATERFGTVAVNLQSSSTDPATGDVHVMGALPGMVWQDRDVYLQGPIWAKIPHTDGHFHPSPLMGGFGLKHPPPQILIKNTPVPANPPAEFSATKFASFITQYSTGQVSVEIEWELQKENSKRWNPEVQYTSNYAKSANVDFTVDNNGLYTEPRPIGTRYLTRPL

SEQ ID NO: 890 - protein, 736 aa, Artificial Sequence
  source: /note="Description of Artificial Sequence: Synthetic polypeptide"
MAADGYLPDWLEDNLSEGIREWWDLKPGAPKPKANQQKQDDGRGLVLPGYKYLGPFNGLDKGEPVNAADAAALEHDKAYDQQLKAGDNPYLRYNHADAEFQERLQEDTSFGGNLGRAVFQAKKRVLEPFGLVEEGAKTAPGKKRPVEQSPQEPDSSSGIGKTGQQPAKKRLNFGQTGDSESVPDPQPLGEPPATPAAVGPTTMASGGGAPMADNNEGADGVGNASGNWHCDSTWLGDRVITTSTRTWALPTYNNHLYKQISSASTGASNDNHYFGYSTPWGYFDFNRFHCHFSPRDWQRLINNNWGFRPKRLNFKLFNVQVKEVTTNDGVTTIANNLTSTVQVFSDSEYQLPYVLGSAHQGCLPPFPADVFMIPQYGYLTLNNGSQAVGRSSFYCLEYFPSQMLRTGNNFTFSYTFEDVPFHSSYAHSQSLDRLMNPLIDQYLYYLNRTQDQSGSAQNKDLLFSRGSPAGMSVQPKNWLPGPCYRQQRVSKTKTDNNNSNFTWTGASKYNLNGRESIINPGTAMASHKDDKDKFFPMSGVMIFGKESAGASNTALDNVMITDEEEIKATNPVATERFGTVAVNLQSSSTDPATGDVHVMGALPGMVWQDRDVYLQGPIWAKIPHTDGHFHPSPLMGGFGLKHPPPQILIKNTPVPANPPAEFSATKFASFITQYSTGQVSVEIEWELQKENSKRWNPEVQYTSNYAKSANVDFTVDNNGLYTEPRPIGTRYLTRPL

SEQ ID NO: 891 - protein, 736 aa, Artificial Sequence
  source: /note="Description of Artificial Sequence: Synthetic polypeptide"
MAADGYLPDWLEDNLSEGIREWWDLKPGAPKPKANQQKQDDGRGLVLPGYKYLGPFNGLDKGEPVNAADAAALEHDKAYDQQLKAGDNPYLRYNHADAEFQERLQEDTSFGGNLGRAVFQAKKRVLEPFGLVEEGAKTAPGKKRPVEQSPQEPDSSSGIGKTGQQPAKKRLNFGQTGDSESVPDPQPLGEPPATPAAVGPTTMASGGGAPMADNNEGADGVGNASGNWHCDSTWLGDRVITTSTRTWALPTYNNHLYKQISSASTGASNDNHYFGYSTPWGYFDFNRFHCHFSPRDWQRLINNNWGFRPKRLNFKLFNIQVKEVTTNDGVTTIANNLTSTVQVFSDSEYQLPYVLGSAHQGCLPPFPADVFMIPQYGYLTLNNGSQAVGRSSFYCLEYFPSQMLRTGNNFTFSYTFEDVPFHSSYAHSQSLDRLMNPLIDQYLYYLNRTQDQSGSAQNKDLLFSRGSPAGMSVQPKNWLPGPCYRQQRVSKTKTDNNNSNFTWTGASKYNLNGRESIINPGTAMASHKDDKNKFFPMSGVMIFGKESAGASNTALDNVMITDEEEIKATNPVATERFGTVAVNLQSSSTDPATGDVHVMGALPGMVWQDRDVYLQGPIWAKIPHTDGHFHPSPLMGGFGLKHPPPQILIKNTPVPANPPAEFSATKFASFITQYSTGQVSVEIEWELQKENSKRWNPEVQYTSNYAKSANVDFTVDNNGLYTEPRPIGTRYLTRPL

SEQ ID NO: 892 - protein, 736 aa, Artificial Sequence
  source: /note="Description of Artificial Sequence: Synthetic polypeptide"
MAADGYLPDWLEDNLSEGIREWWDLKPGAPKPKANQQKQDDGRGLVLPGYKYLGPFNGLDKGEPVNAADAAALEHDKAYDQQLKAGDNPYLRYNHADAEFQERLQEDTSFGGNLGRAVFQAKKRVLEPFGLVEEGAKTAPGKKRPVEQSPQEPDSSSGIGKTGQQPAKKRLNFGQTGDSESVPDPQPLGEPPATPAAVGPTTMASGGGAPMADNNEGADGVGNASGNWHCDSTWLGDRVITTSTRTWALPTYNNHLYKQISSASTGASNDNHYFGYSTPWGYFDFNRFHCHFSPRDWQRLINNNWGFRPKRLNFKLFNVQVKEVTTNDGVTTIANNLTSTVQVFSDSEYQLPYVLGSAHQGCLPPFPADVFMIPQYGYLTLNNGSQAVGRSSFYCLEYFPSQMLRTGNNFTFSYTFEDVPFHSSYAHSQSLDRLMNPLIDQYLYYLNRTQNQSGSAQNKDLLFSRGSPAGMSVQPKNWLPGPCYRQQRVSKTKTDNNNSNFTWTGASKYNLNGRESIINPGTAMASHKDDKDKFFPMSGVMIFGKESAGASNTALDNVMITDEEEIKATNPVATERFGTVAVNLQSSSTDPATGDVHVMGALPGMVWQDRDVYLQGPIWAKIPHTDGHFHPSPLMGGFGLKHPPPQILIKNTPVPANPPAEFSATKFASFITQYSTGQVSVEIEWELQKENSKRWNPEVQYTSNYAKSANVDFTVDNNGLYTEPRPIGTRYLTRPL

SEQ ID NO: 893 - protein, 736 aa, Artificial Sequence
  source: /note="Description of Artificial Sequence: Synthetic polypeptide"
MAADGYLPDWLEDNLSEGIREWWDLKPGAPKPKANQQKQDDGRGLVLPGYKYLGPFNGLDKGEPVNAADAAALEHDKAYDQQLKAGDNPYLRYNHADAEFQERLQEDTSFGGNLGRAVFQAKKRVLEPFGLVEEGAKTAPGKKRPVEQSPQEPDSSSGIGKTGQQPAKKRLNFGQTGDSESVPDPQPLGEPPATPAAVGPTTMASGGGAPMADNNEGADGVGNASGNWHCDSTWLGDRVITTSTRTWALPTYNNHLYKQISSASTGASNDNHYFGYSTPWGYFDFNRFHCHFSPRDWQRLINNNWGFRPKRLNFKLFNVQVKEVTTNDGVTTIANNLTSTVQVFSDSEYQLPYVLGSAHQGCLPPFPADVFMIPQYGYLTLNNGSQAVGRSSFYCLEYFPSQMLRTGNNFTFSYTFEDVPFHSSYAHSQSLDRLMNPLIDQYLYYLNRTQNQSGSAQNKDLLFSRGSPAGMSVQPKNWLPGPCYRQQRVSKTKTDNNNSNFTWTGASKYNLNGRESIINPGTAMASHKDDKNKFFPMSGVMIFGKESAGASNTALDNVMITDEEEIKATNPVATERFGTVAVNLQSSSTDPATGDVHVMGALPGMVWQDRDVYLQGPIWAKIPHTDGHFHPSPLMGGFGLKHPPPQILIKNTPVPANPPAEFSATKFASFITQYSTGQVSVEIEWELQKENSKRWNPEVQYTSNYAKSANVDFTVDNNGLYTEPRPIGTRYLTRPL

SEQ ID NO: 894 - DNA, 2217 bp, Artificial Sequence
  source: /note="Description of Artificial Sequence: Synthetic polynucleotide"
atggctgccgatggttatcttccagattggctcgaggacaacctctctgagggcattcgcgagtggtgggacctgaaacctggagccccgaaacccaaagccaaccagcaaaagcaggacaacggccggggtctggtgcttcctggctacaagtacctcggacccttcaacggactcgacaagggggagcccgtcaacgcggcggacgcagcggccctcgagcacgacaaggcctacgaccagcagctccaagcgggtgacaatccgtacctgcggtataatcacgccgacgccgagtttcaggagcgtctgcaagaagatacgtcttttgggggcaacctcgggcgcgcagtcttccaggccaaaaagcgggttctcgaacctctgggcctggttgaatcgccggttaagacggctcctggaaagaagagaccggtagagccatcaccccagcgctctccagactcctctacgggcatcggcaagaaaggccagcagcccgcaaaaaagagactcaattttgggcagactggcgactcagagtcagtccccgaccctcaaccaatcggagaaccaccagcaggcccctctggtctgggatctggtacaatggctgcaggcggtggcgctccaatggcagacaataacgaaggcgccgacggagtgggtagttcctcaggaaattggcattgcgattccacatggctgggcgacagagtcatcaccaccagcacccgcacctgggccctgcccacctacaacaaccacctctacaagcaaatctccaacgggacctcgggaggaagcaccaacgacaacacctacttcggctacagcaccccctgggggtattttgacttcaacagattccactgccacttttcaccacgtgactggcagcgactcatcaacaacaactggggattccggcccaagaggctcaacttcaagctcttcaacatccaagtcaaggaggtcacgcagaatgaaggcaccaagaccatcgccaataaccttaccagcacgattcaggtctttacggactcggaataccagctcccgtacgtgctcggctcggcgcaccagggctgcctgcctccgttcccggcggacgtcttcatgattcctcagtacgggtacctgactctgaacaatggcagtcaggctgtgggccggtcgtccttctactgcctggagtactttccttctcaaatgctgagaacgggcaacaactttgaattcagctacaacttcgaggacgtgcccttccacagcagctacgcgcacagccagagcctggaccggctgatgaaccctctcatcgaccagtacttgtactacctgtcccggactcaaagcacgggcggtactgcaggaactcagcagttgctattttctcaggccgggcctaacaacatgtcggctcaggccaagaactggctacccggtccctgctaccggcagcaacgcgtctccacgacactgtcgcagaacaacaacagcaactttgcctggacgggtgccaccaagtatcatctgaatggcagagactctctggtgaatcctggcgttgccatggctacccacaaggacgacgaagagcgattttttccatccagcggagtcttaatgtttgggaaacagggagctggaaaagacaacgtggactatagcagcgtgatgctaaccagcgaggaagaaataaagaccaccaacccagtggccacagaacagtacggcgtggtggccgataacctgcaacagcaaaacgccgctcctattgtaggggccgtcaatagtcaaggagccttacctggcatggtgtggcagaaccgggacgtgtacctgcagggtcccatctgggccaagattcctcatacggacggcaactttcatccctcgccgctgatgggaggctttggactgaagcatccgcctcctcagatcctgattaaaaacacacctgttcccgcggatcctccgaccaccttcaatcaggccaagctggcttctttcatcacgcagtacagtaccggccaggtcagcgtggagatcgagtgggagctgcagaaggagaacagcaaacgctggaacccagagattcagtacacttccaactactacaaatctacaaatgtggactttgctgtcaatactgagggtacttattccgagcctcgccccattggcacccgttacctcacccgtaatctgtaa

SEQ ID NO: 895 - protein, 738 aa, Artificial Sequence
  source: /note="Description of Artificial Sequence: Synthetic polypeptide"
MAADGYLPDWLEDNLSEGIREWWDLKPGAPKPKANQQKQDNGRGLVLPGYKYLGPFNGLDKGEPVNAADAAALEHDKAYDQQLQAGDNPYLRYNHADAEFQERLQEDTSFGGNLGRAVFQAKKRVLEPLGLVESPVKTAPGKKRPVEPSPQRSPDSSTGIGKKGQQPAKKRLNFGQTGDSESVPDPQPIGEPPAGPSGLGSGTMAAGGGAPMADNNEGADGVGSSSGNWHCDSTWLGDRVITTSTRTWALPTYNNHLYKQISNGTSGGSTNDNTYFGYSTPWGYFDFNRFHCHFSPRDWQRLINNNWGFRPKRLNFKLFNIQVKEVTQNEGTKTIANNLTSTIQVFTDSEYQLPYVLGSAHQGCLPPFPADVFMIPQYGYLTLNNGSQAVGRSSFYCLEYFPSQMLRTGNNFEFSYNFEDVPFHSSYAHSQSLDRLMNPLIDQYLYYLSRTQSTGGTAGTQQLLFSQAGPNNMSAQAKNWLPGPCYRQQRVSTTLSQNNNSNFAWTGATKYHLNGRDSLVNPGVAMATHKDDEERFFPSSGVLMFGKQGAGKDNVDYSSVMLTSEEEIKTTNPVATEQYGVVADNLQQQNAAPIVGAVNSQGALPGMVWQNRDVYLQGPIWAKIPHTDGNFHPSPLMGGFGLKHPPPQILIKNTPVPADPPTTFNQAKLASFITQYSTGQVSVEIEWELQKENSKRWNPEIQYTSNYYKSTNVDFAVNTEGTYSEPRPIGTRYLTRNL

SEQ ID NO: 896 - protein, 738 aa, Artificial Sequence; identical to SEQ ID NO: 895
  source: /note="Description of Artificial Sequence: Synthetic polypeptide"

SEQ ID NO: 897 - DNA, 4472 bp, Artificial Sequence
  source: /note="Description of Artificial Sequence: Synthetic polynucleotide"
ctccatcactaggggtaaccgcgaagcgcctcccacgctgccgcgtcagcgctgacgtaaattacgtcataggggagtggtcctgtattagctgtcacgtgagtgcttttgcgacattttgcgacaccacgtggccattcatggtatatatggccgagtgagcgagcaggatctccattttgaccgcgaaatttgaacgagcagcagccatgccgggcttctacgagatcgtgcttaaggtgccgagcgacctggacgagcacctgccgggcatttctgactcgtttgtgaactgggtggcagagaaggaatgggagctgcccccggattctgacatggatcggaatctgattgagcaggcacccctgaccgtggccgagaagctacagcgcgacttcctggtccaatggcgccgcgtgagtaaggccccggaggccctcttctttgttcagttcgagaagggcgagtcctacttccacctccatattctggtagagaccacgggggtcaaatccatggtgctgggccgcttcctgagtcagattcgggacaagctggtgcagaccatctaccgcgggatcgagccgaccctgcccaactggttcgcggtgacaaagacgcgtaatggcgccggaggggggaacaaggtggtggacgagtgctacatccccaactacctgctgcccaagactcagcccgagctgcagtgggcgtggactaacatggaggagtatataagcgcgtgcttgaacctggccgagcgcaaacggctcgtggcgcagcacctgacccacgtcagccagacccaggagcagaacaaggagaatctgaacccgaattctgacgcgcctgtcatccggtcaaaaacctccgcgcgctacatggagctggtcgggtggctggtggaccggggcatcacctccgagaagcagtggatccaggaggaccaggcctcgtacatctccttcaacgccgcctccaactcgcggtctcagatcaaggccgcgctggacaatgccggcaagatcatggcgctgaccaaatccgcgcccgactacctggtaggccccgctctgcccgcggacattaaatccaaccgcatctaccgcatcctggagctgaatggctacgaccctgcctacgccggttccgtctttctcggctgggcccagaaaaagtttggcaaaaggaacaccatctggctgtttgggccggccaccacgggcaagaccaacatcgcggaagccatcgcccacgccgtgcccttctacggctgcgtcaactggaccaatgagaactttcccttcaacgattgcgtcgacaagatggtgatctggtgggaggagggcaagatgacggccaaggtcgtggagtccgccaaggccattctcggcggcagcaaggtgcgcgtggaccaaaagtgcaagtcgtccgcccagatcgatcccacccccgtgatcgtcacctccaacaccaacatgtgcgccgtgattgacgggaacagcaccaccttcgagcaccagcagccgttgcaggaccggatgttcaaatttgaacttacccgccgtctggagcacgactttggcaaggtgacaaagcaggaagtcaaagagttcttccgctgggcgcaggatcacgtgaccgaggtggcgcatgagttctacgtcagaaagggtggagctaacaaaagacccgcccccgatgacgcggatataagcgagcccaagcgggcctgcccctcagtcgcggatccatcgacgtcagacgcggaaggagctccggtggactttgccgacaggtaccaaaacaaatgttctcgtcacgcgggcatgcttcagatgctgtttccctgcaaaacatgcgagagaatgaatcagaatttcaacatttgcttcacgcacgggaccagagactgttcagaatgtttccctggcgtgtcagaatctcaaccggtcgtcagaaaaaagacgtatcggaaactctgtgcgattcatcatctgctggggcgggcacccgagattgcttgctcggcctgcgacctggtcaacgtggacctggatgactgtgtttctgagcaataaatgacttaaaccaggtatggctgccgatggttatcttccagattggctcgaggacaacctctctgagggcattcgcgagtggtgggacctgaaacctggagccccgaaacccaaagccaaccagcaaaagcaggacaacggccggggtctggtgcttcctggctacaagtacctcggacccttcaacggactcgacaagggggagcccgtcaacgcggcggacgcagcggccctcgagcacgacaaggcctacgaccagcagctccaagcgggtgacaatccgtacctgcggtataatcacgccgacgccgagtttcaggagcgtctgcaagaagatacgtcttttgggggcaacctcgggcgcgcagtcttccaggccaaaaagcgggttctcgaacctctgggcctggttgaatcgccggttaagacggctcctggaaagaagagaccggtagagccatcaccccagcgctctccagactcctctacgggcatcggcaagaaaggccagcagcccgcaaaaaagagactcaattttgggcagactggcgactcagagtcagtccccgaccctcaaccaatcggagaaccaccagcaggcccctctggtctgggatctggtacaatggctgcaggcggtggcgctccaatggcagacaataacgaaggcgccgacggagtgggtagttcctcaggaaattggcattgcgattccacatggctgggcgacagagtcatcaccaccagcacccgcacctgggccctgcccacctacaacaaccacctctacaagcaaatctccaacgggacctcgggaggaagcaccaacgacaacacctacttcggctacagcaccccctgggggtattttgacttcaacagattccactgccacttttcaccacgtgactggcagcgactcatcaacaacaactggggattccggcccaagaggctcaacttcaagctcttcaacatccaagtcaaggaggtcacgcagaatgaaggcaccaagaccatcgccaataaccttaccagcacgattcaggtctttacggactcggaataccagctcccgtacgtgctcggctcggcgcaccagggctgcctgcctccgttcccggcggacgtcttcatgattcctcagtacgggtacctgactctgaacaatggcagtcaggctgtgggccggtcgtccttctactgcctggagtactttccttctcaaatgctgagaacgggcaacaactttgaattcagctacaacttcgaggacgtgcccttccacagcagctacgcgcacagccagagcctggaccggctgatgaaccctctcatcgaccagtacttgtactacctgtcccggactcaaagcacgggcggtactgcaggaactcagcagttgctattttctcaggccgggcctaacaacatgtcggctcaggccaagaactggctacccggtccctgctaccggcagcaacgcgtctccacgacactgtcgcagaacaacaacagcaactttgcctggacgggtgccaccaagtatcatctgaatggcagagactctctggtgaatcctggcgttgccatggctacccacaaggacgacgaagagcgattttttccatccagcggagtcttaatgtttgggaaacagggagctggaaaagacaacgtggactatagcagcgtgatgctaaccagcgaggaagaaataaagaccaccaacccagtggccacagaacagtacggcgtggtggccgataacctgcaacagcaaaacgccgctcctattgtaggggccgtcaatagtcaaggagccttacctggcatggtgtggcagaaccgggacgtgtacctgcagggtcccatctgggccaagattcctcatacggacggcaactttcatccctcgccgctgatgggaggctttggactgaagcatccgcctcctcagatcctgattaaaaacacacctgttcccgcggatcctccgaccaccttcaatcaggccaagctggcttctttcatcacgcagtacagtaccggccaggtcagcgtggagatcgagtgggagctgcagaaggagaacagcaaacgctggaacccagagattcagtacacttccaactactacaaatctacaaatgtggactttgctgtcaatactgagggtacttattccgagcctcgccccattggcacccgttacctcacccgtaatctgtaattacatgttaatcaataaaccggttaattcgtttcagttgaactttggtctcctgtccttcttatcttatcggttaccatagaaactggttacttattaactgcttggtgcgcttcgcgataaaagacttacgtcatcgggttacccctagtgatgga

SEQ ID NO: 898 - protein, 738 aa, Artificial Sequence
  source: /note="Description of Artificial Sequence: Synthetic polypeptide"
MAADGYLPDWLEDNLSEGIREWWDLKPGAPKPKANQQKQDNGRGLVLPGYKYLGPFNGLDKGEPVNAADAAALEHDKAYDQQLQAGDNPYLRYNHADAEFQERLQEDTSFGGNLGRAVFQAKKRVLEPLGLVESPVKTAPGKKRPVEPSPQRSPDSSTGIGKKGQQPAKKRLNFGQTGDSESVPDPQPIGEPPAAPSGVGPNTMAAGGGAPMADNNEGADGVGSSSGNWHCDSTWLGDRVITTSTRTWALPTYNNHLYKQISNGTSGGSTNDNTYFGYSTPWGYFDFNRFHCHFSPRDWQRLINNNWGFRPKRLNFKLFNIQVKEVTQNEGTKTIANNLTSTIQVFTDSEYQLPYVLGSAHQGCLPPFPADVFMIPQYGYLTLNNGSQAVGRSSFYCLEYFPSQMLRTGNNFEFSYNFEDVPFHSSYAHSQSLDRLMNPLIDQYLYYLSRTQSTGGTAGTQQLLFSQAGPNNMSAQAKNWLPGPCYRQQRVSTTLSQNNNSNFAWTGATKYHLNGRDSLVNPGVAMATHKDDEERFFPSSGVLMFGKQGAGKDNVDYSSVMLTSEEEIKTTNPVATEQYGVVADNLQQQNAAPIVGAVNSQGALPGMVWQNRDVYLQGPIWAKIPHTDGNFHPSPLMGGFGLKHPPPQILIKNTPVPADPPTTFNQAKLASFITQYSTGQVSVEIEWELQKENSKRWNPEIQYTSNYYKSTNVDFAVNTEGTYSEPRPIGTRYLTRNL

SEQ ID NO: 899 - protein, 738 aa, Artificial Sequence
  source: /note="Description of Artificial Sequence: Synthetic polypeptide"
MAADGYLPDWLEDNLSEGIREWWDLKPGAPKPKANQQRQDNGRGLVLPGYRYLGPFNGLDKGEPVNAADAAALEHDRAYDQQLQAGDNPYLRYNHADAEFQERLQEDTSFGGNLGRAVFQAKKRVLEPLGLVESPVRTAPGKKRPVEPSPQRSPDSSTGIGKKGQQPARKRLNFGQTGDSESVPDPQPIGEPPAAPSGVGPNTMAAGGGAPMADNNEGADGVGSSSGNWHCDSTWLGDRVITTSTRTWALPTYNNHLYRQISNGTSGGSTNDNTYFGYSTPWGYFDFNRFHCHFSPRDWQRLINNNWGFRPKRLNFKLFNIQVKEVTQNEGTRTIANNLTSTIQVFTDSEYQLPYVLGSAHQGCLPPFPADVFMIPQYGYLTLNNGSQAVGRSSFYCLEYFPSQMLRTGNNFEFSYNFEDVPFHSSYAHSQSLDRLMNPLIDQYLYYLSRTQSTGGTAGTQQLLFSQAGPNNMSAQAKNWLPGPCYRQQRVSTTLSQNNNSNFAWTGATKYHLNGRDSLVNPGVAMATHRDDEERFFPSSGVLMFGRQGAGRDNVDYSSVMLTSEEEIRTTNPVATEQYGVVADNLQQQNAAPIVGAVNSQGALPGMVWQNRDVYLQGPIWAKIPHTDGNFHPSPLMGGFGLKHPPPQILIKNTPVPADPPTTFNQAKLASFITQYSTGQVSVEIEWELQKENSKRWNPEIQYTSNYYKSTNVDFAVNTEGTYSEPRPIGTRYLTRNL

SEQ ID NO: 900 - protein, 738 aa, Artificial Sequence
  source: /note="Description of Artificial Sequence: Synthetic polypeptide"
MAADGYLPDWLEDNLSEGIREWWDLKPGAPKPKANQQRQDNGRGLVLPGYRYLGPFNGLDKGEPVNAADAAALEHDRAYDQQLQAGDNPYLRYNHADAEFQERLQEDTSFGGNLGRAVFQAKKRVLEPLGLVESPVRTAPGKKRPVEPSPQRSPDSSTGIGKRGQQPARKRLNFGQTGDSESVPDPQPIGEPPAAPSGVGPNTMAAGGGAPMADNNEGADGVGSSSGNWHCDSTWLGDRVITTSTRTWALPTYNNHLYRQISNGTSGGSTNDNTYFGYSTPWGYFDFNRFHCHFSPRDWQRLINNNWGFRPKRLNFKLFNIQVKEVTQNEGTRTIANNLTSTIQVFTDSEYQLPYVLGSAHQGCLPPFPADVFMIPQYGYLTLNNGSQAVGRSSFYCLEYFPSQMLRTGNNFEFSYNFEDVPFHSSYAHSQSLDRLMNPLIDQYLYYLSRTQSTGGTAGTQQLLFSQAGPNNMSAQAKNWLPGPCYRQQRVSTTLSQNNNSNFAWTGATKYHLNGRDSLVNPGVAMATHRDDEERFFPSSGVLMFGKQGAGRDNVDYSSVMLTSEEEIRTTNPVATEQYGVVADNLQQQNAAPIVGAVNSQGALPGMVWQNRDVYLQGPIWAKIPHTDGNFHPSPLMGGFGLKHPPPQILIKNTPVPADPPTTFNQAKLASFITQYSTGQVSVEIEWELQKENSKRWNPEIQYTSNYYKSTNVDFAVNTEGTYSEPRPIGTRYLTRNL

SEQ ID NO: 901 - protein, 738 aa, Artificial Sequence
  source: /note="Description of Artificial Sequence: Synthetic polypeptide"
MAADGYLPDWLEDNLSEGIREWWDLKPGAPKPKANQQRQDNGRGLVLPGYRYLGPFNGLDKGEPVNAADAAALEHDRAYDQQLQAGDNPYLRYNHADAEFQERLQEDTSFGGNLGRAVFQAKKRVLEPLGLVESPVRTAPGKKRPVEPSPQRSPDSSTGIGKRGQQPAKKRLNFGQTGDSESVPDPQPIGEPPAAPSGVGPNTMAAGGGAPMADNNEGADGVGSSSGNWHCDSTWLGDRVITTSTRTWALPTYNNHLYRQISNGTSGGSTNDNTYFGYSTPWGYFDFNRFHCHFSPRDWQRLINNNWGFRPKRLNFKLFNIQVKEVTQNEGTRTIANNLTSTIQVFTDSEYQLPYVLGSAHQGCLPPFPADVFMIPQYGYLTLNNGSQAVGRSSFYCLEYFPSQMLRTGNNFEFSYNFEDVPFHSSYAHSQSLDRLMNPLIDQYLYYLSRTQSTGGTAGTQQLLFSQAGPNNMSAQAKNWLPGPCYRQQRVSTTLSQNNNSNFAWTGATKYHLNGRDSLVNPGVAMATHRDDEERFFPSSGVLMFGRQGAGRDNVDYSSVMLTSEEEIRTTNPVATEQYGVVADNLQQQNAAPIVGAVNSQGALPGMVWQNRDVYLQGPIWAKIPHTDGNFHPSPLMGGFGLKHPPPQILIKNTPVPADPPTTFNQAKLASFITQYSTGQVSVEIEWELQKENSKRWNPEIQYTSNYYKSTNVDFAVNTEGTYSEPRPIGTRYLTRNL

SEQ ID NO: 902 - protein, 738 aa, Artificial Sequence
  source: /note="Description of Artificial Sequence: Synthetic polypeptide"
MAADGYLPDWLEDNLSEGIREWWDLKPGAPKPKANQQRQDNGRGLVLPGYRYLGPFNGLDKGEPVNAADAAALEHDRAYDQQLQAGDNPYLRYNHADAEFQERLQEDTSFGGNLGRAVFQAKKRVLEPLGLVESPVRTAPGKKRPVEPSPQRSPDSSTGIGKRGQQPAKKRLNFGQTGDSESVPDPQPIGEPPAAPSGVGPNTMAAGGGAPMADNNEGADGVGSSSGNWHCDSTWLGDRVITTSTRTWALPTYNNHLYRQISNGTSGGSTNDNTYFGYSTPWGYFDFNRFHCHFSPRDWQRLINNNWGFRPKRLNFKLFNIQVKEVTQNEGTRTIANNLTSTIQVFTDSEYQLPYVLGSAHQGCLPPFPADVFMIPQYGYLTLNNGSQAVGRSSFYCLEYFPSQMLRTGNNFEFSYNFEDVPFHSSYAHSQSLDRLMNPLIDQYLYYLSRTQSTGGTAGTQQLLFSQAGPNNMSAQAKNWLPGPCYRQQRVSTTLSQNNNSNFAWTGATKYHLNGRDSLVNPGVAMATHRDDEERFFPSSGVLMFGKQGAGRDNVDYSSVMLTSEEEIRTTNPVATEQYGVVADNLQQQNAAPIVGAVNSQGALPGMVWQNRDVYLQGPIWAKIPHTDGNFHPSPLMGGFGLKHPPPQILIKNTPVPADPPTTFNQARLASFITQYSTGQVSVEIEWELQKENSKRWNPEIQYTSNYYKSTNVDFAVNTEGTYSEPRPIGTRYLTRNL

SEQ ID NO: 903 - protein, 738 aa, Artificial Sequence
  source: /note="Description of Artificial Sequence: Synthetic polypeptide"
MAADGYLPDWLEDNLSEGIREWWDLKPGAPKPKANQQRQDNGRGLVLPGYRYLGPFNGLDKGEPVNAADAAALEHDRAYDQQLQAGDNPYLRYNHADAEFQERLQEDTSFGGNLGRAVFQAKKRVLEPLGLVESPVRTAPGKKRPVEPSPQRSPDSSTGIGKKGQQPAKKRLNFGQTGDSESVPDPQPIGEPPAAPSGVGPNTMAAGGGAPMADNNEGADGVGSSSGNWHCDSTWLGDRVITTSTRTWALPTYNNHLYRQISNGTSGGSTNDNTYFGYSTPWGYFDFNRFHCHFSPRDWQRLINNNWGFRPKRLNFKLFNIQVKEVTQNEGTRTIANNLTSTIQVFTDSEYQLPYVLGSAHQGCLPPFPADVFMIPQYGYLTLNNGSQAVGRSSFYCLEYFPSQMLRTGNNFEFSYNFEDVPFHSSYAHSQSLDRLMNPLIDQYLYYLSRTQSTGGTAGTQQLLFSQAGPNNMSAQAKNWLPGPCYRQQRVSTTLSQNNNSNFAWTGATKYHLNGRDSLVNPGVAMATHRDDEERFFPSSGVLMFGRQGAGRDNVDYSSVMLTSEEEIRTTNPVATEQYGVVADNLQQQNAAPIVGAVNSQGALPGMVWQNRDVYLQGPIWAKIPHTDGNFHPSPLMGGFGLKHPPPQILIKNTPVPADPPTTFNQARLASFITQYSTGQVSVEIEWELQKENSKRWNPEIQYTSNYYKSTNVDFAVNTEGTYSEPRPIGTRYLTRNL

SEQ ID NO: 904 - DNA, 2214 bp, Artificial Sequence
  source: /note="Description of Artificial Sequence: Synthetic polynucleotide"
atggctgccgatggttatcttccagattggctcgaggacaacctctctgagggcattcgcgagtggtgggacctgaaacctggagccccgaaacccaaagccaaccagcaaaagcaggacaacggccggggtctggtgcttcctggctacaagtacctcggacccttcaacggactcgacaagggggagcccgtcaacgcggcggacgcagcggccctcgagcacgacaaggcctacgaccagcagctccaagcgggtgacaatccgtacctgcggtataatcacgccgacgccgagtttcaggagcgtctgcaagaagatacgtcttttgggggcaacctcgggcgcgcagtcttccaggccaaaaagcgggttctcgaacctctgggcctggttgaatcgccggttaagacggctcctggaaagaagagaccggtagagccatcaccccagcgctctccagactcctctacgggcatcggcaagaaaggccagcagcccgcaaaaaagagactcaattttgggcagactggcgactcagagtcagtccccgaccctcaaccaatcggagaaccaccagcagccccctctggtgtgggacctaatacaatggctgcaggcggtggcgctccaatggcagacaataacgaaggcgccgacggagtgggtagttcctcaggaaattggcattgcgattccacatggctgggcgacagagtcatcaccaccagcacccgcacctgggccctgcccacctacaacaaccacctctacaagcaaatctccaacgggacctcgggaggaagcaccaacgacaacacctacttcggctacagcaccccctgggggtattttgacttcaacagattccactgccacttttcaccacgtgactggcagcgactcatcaacaacaactggggattccggcccaagaggctcaacttcaagctcttcaacatccaagtcaaggaggtcacgcagaatgaaggcaccaagaccatcgccaataaccttaccagcacgattcaggtctttacggactcggaataccagctcccgtacgtgctcggctcggcgcaccagggctgcctgcctccgttcccggcggacgtcttcatgattcctcagtacgggtacctgactctgaacaatggcagtcaggctgtgggccggtcgtccttctactgcctggagtactttccttctcaaatgctgagaacgggcaacaactttgaattcagctacaacttcgaggacgtgcccttccacagcagctacgcgcacagccagagcctggaccggctgatgaaccctctcatcgaccagtacttgtactacctgtcccggactcaaagcacgggcggtactgcaggaactcagcagttgctattttctcaggccgggcctaacaacatgtcggctcaggccaagaactggctacccggtccctgctaccggcagcaacgcgtctccacgacactgtcgcagaacaacaacagcaactttgcctggacgggtgccaccaagtatcatctgaatggcagagactctctggtgaatcctggcgttgccatggctacccacaaggacgacgaagagcgattttttccatccagcggagtcttaatgtttgggaaacagggagctggaaaagacaacgtggactatagcagcgtgatgctaaccagcgaggaagaaataaagaccaccaacccagtggccacagaacagtacggcgtggtggccgataacctgcaacagcaaaacgccgctcctattgtaggggccgtcaatagtcaaggagccttacctggcatggtgtggcagaaccgggacgtgtacctgcagggtcccatctgggccaagattcctcatacggacggcaactttcatccctcgccgctgatgggaggctttggactgaagcatccgcctcctcagatcctgattaaaaacacacctgttcccgcggatcctccgaccaccttcaatcaggccaagctggcttctttcatcacgcagtacagtaccggccaggtcagcgtggagatcgagtgggagctgcagaaggagaacagcaaacgctggaacccagagattcagtacacttccaactactacaaatctacaaatgtggactttgctgtcaatactgagggtacttattccgagcctcgccccattggcacccgttacctcacccgtaatctg

SEQ ID NO: 905 - DNA, 2217 bp, Artificial Sequence
  source: /note="Description of Artificial Sequence: Synthetic polynucleotide"
atggctgccgatggttatcttccagattggctcgaggacaacctctctgagggcattcgcgagtggtgggacctgaaacctggagccccgaaacccaaagccaaccagcaaaggcaggacaacggccggggtctggtgcttcctggctacaggtacctcggacccttcaacggactcgacaagggggagcccgtcaacgcggcggacgcagcggccctcgagcacgacagggcctacgaccagcagctccaagcgggtgacaatccgtacctgcggtataatcacgccgacgccgagtttcaggagcgtctgcaagaagatacgtcttttgggggcaacctcgggcgcgcagtcttccaggccaaaaagcgggttctcgaacctctgggcctggttgaatcgccggttaggacggctcctggaaagaagagaccggtagagccatcaccccagcgctctccagactcctctacgggcatcggcaagaaaggccagcagcccgcaagaaagagactcaattttgggcagactggcgactcagagtcagtccccgaccctcaaccaatcggagaaccaccagcagccccctctggtgtgggacctaatacaatggctgcaggcggtggcgctccaatggcagacaataacgaaggcgccgacggagtgggtagttcctcaggaaattggcattgcgattccacatggctgggcgacagagtcatcaccaccagcacccgcacctgggccctgcccacctacaacaaccacctctacaggcaaatctccaacgggacctcgggaggaagcaccaacgacaacacctacttcggctacagcaccccctgggggtattttgacttcaacagattccactgccacttttcaccacgtgactggcagcgactcatcaacaacaactggggattccggcccaagaggctcaacttcaagctcttcaacatccaagtcaaggaggtcacgcagaatgaaggcaccaggaccatcgccaataaccttaccagcacgattcaggtctttacggactcggaataccagctcccgtacgtgctcggctcggcgcaccagggctgcctgcctccgttcccggcggacgtcttcatgattcctcagtacgggtacctgactctgaacaatggcagtcaggctgtgggccggtcgtccttctactgcctggagtactttccttctcaaatgctgagaacgggcaacaactttgaattcagctacaacttcgaggacgtgcccttccacagcagctacgcgcacagccagagcctggaccggctgatgaaccctctcatcgaccagtacttgtactacctgtcccggactcaaagcacgggcggtactgcaggaactcagcagttgctattttctcaggccgggcctaacaacatgtcggctcaggccaagaactggctacccggtccctgctaccggcagcaacgcgtctccacgacactgtcgcagaacaacaacagcaactttgcctggacgggtgccaccaagtatcatctgaatggcagagactctctggtgaatcctggcgttgccatggctacccacagggacgacgaagagcgattttttccatccagcggagtcttaatgtttgggagacagggagctggaagagacaacgtggactatagcagcgtgatgctaaccagcgaggaagaaataaggaccaccaacccagtggccacagaacagtacggcgtggtggccgataacctgcaacagcaaaacgccgctcctattgtaggggccgtcaatagtcaaggagccttacctggcatggtgtggcagaaccgggacgtgtacctgcagggtcccatctgggccaagattcctcatacggacggcaactttcatccctcgccgctgatgggaggctttggactgaagcatccgcctcctcagatcctgattaaaaacacacctgttcccgcggatcctccgaccaccttcaatcaggccaagctggcttctttcatcacgcagtacagtaccggccaggtcagcgtggagatcgagtgggagctgcagaaggagaacagcaaacgctggaacccagagattcagtacacttccaactactacaaatctacaaatgtggactttgctgtcaatactgagggtacttattccgagcctcgccccattggcacccgttacctcacccgtaatctgtaa

SEQ ID NO: 906 - DNA, 2217 bp, Artificial Sequence
  source: /note="Description of Artificial Sequence: Synthetic polynucleotide"
atggctgccgatggttatcttccagattggctcgaggacaacctctctgagggcattcgcgagtggtgggacctgaaacctggagccccgaaacccaaagccaaccagcaaaggcaggacaacggccggggtctggtgcttcctggctacaggtacctcggacccttcaacggactcgacaagggggagcccgtcaacgcggcggacgcagcggccctcgagcacgacagggcctacgaccagcagctccaagcgggtgacaatccgtacctgcggtataatcacgccgacgccgagtttcaggagcgtctgcaagaagatacgtcttttgggggcaacctcgggcgcgcagtcttccaggccaaaaagcgggttctcgaacctctgggcctggttgaatcgccggttaggacggctcctggaaagaagagaccggtagagccatcaccccagcgctctccagactcctctacgggcatcggcaagagaggccagcagcccgcaagaaagagactcaattttgggcagactggcgactcagagtcagtccccgaccctcaaccaatcggagaaccaccagcagccccctctggtgtgggacctaatacaatggctgcaggcggtggcgctccaatggcagacaataacgaaggcgccgacggagtgggtagttcctcaggaaattggcattgcgattccacatggctgggcgacagagtcatcaccaccagcacccgcacctgggccctgcccacctacaacaaccacctctacaggcaaatctccaacgggacctcgggaggaagcaccaacgacaacacctacttcggctacagcaccccctgggggtattttgacttcaacagattccactgccacttttcaccacgtgactggcagcgactcatcaacaacaactggggattccggcccaagaggctcaacttcaagctcttcaacatccaagtcaaggaggtcacgcagaatgaaggcaccaggaccatcgccaataaccttaccagcacgattcaggtctttacggactcggaataccagctcccgtacgtgctcggctcggcgcaccagggctgcctgcctccgttcccggcggacgtcttcatgattcctcagtacgggtacctgactctgaacaatggcagtcaggctgtgggccggtcgtccttctactgcctggagtactttccttctcaaatgctgagaacgggcaacaactttgaattcagctacaacttcgaggacgtgcccttccacagcagctacgcgcacagccagagcctggaccggctgatgaaccctctcatcgaccagtacttgtactacctgtcccggactcaaagcacgggcggtactgcaggaactcagcagttgctattttctcaggccgggcctaacaacatgtcggctcaggccaagaactggctacccggtccctgctaccggcagcaacgcgtctccacgacactgtcgcagaacaacaacagcaactttgcctggacgggtgccaccaagtatcatctgaatggcagagactctctggtgaatcctggcgttgccatggctacccacagggacgacgaagagcgattttttccatccagcggagtcttaatgtttgggaaacagggagctggaagagacaacgtggactatagcagcgtgatgctaaccagcgaggaagaaataaggaccaccaacccagtggccacagaacagtacggcgtggtggccgataacctgcaacagcaaaacgccgctcctattgtaggggccgtcaatagtcaaggagccttacctggcatggtgtggcagaaccgggacgtgtacctgcagggtcccatctgggccaagattcctcatacggacggcaactttcatccctcgccgctgatgggaggctttggactgaagcatccgcctcctcagatcctgattaaaaacacacctgttcccgcggatcctccgaccaccttcaatcaggccaagctggcttctttcatcacgcagtacagtaccggccaggtcagcgtggagatcgagtgggagctgcagaaggagaacagcaaacgctggaacccagagattcagtacacttccaactactacaaatctacaaatgtggactttgctgtcaatactgagggtacttattccgagcctcgccccattggcacccgttacctcacccgtaatctgtaa

SEQ ID NO: 907 - DNA, 2217 bp, Artificial Sequence
  source: /note="Description of Artificial Sequence: Synthetic polynucleotide"
atggctgccgatggttatcttccagattggctcgaggacaacctctctgagggcattcgcgagtggtgggacctgaaacctggagccccgaaacccaaagccaaccagcaaaggcaggacaacggccggggtctggtgcttcctggctacaggtacctcggacccttcaacggactcgacaagggggagcccgtcaacgcggcggacgcagcggccctcgagcacgacagggcctacgaccagcagctccaagcgggtgacaatccgtacctgcggtataatcacgccgacgccgagtttcaggagcgtctgcaagaagatacgtcttttgggggcaacctcgggcgcgcagtcttccaggccaaaaagcgggttctcgaacctctgggcctggttgaatcgccggttaggacggctcctggaaagaagagaccggtagagccatcaccccagcgctctccagactcctctacgggcatcggcaagagaggccagcagcccgcaaaaaagagactcaattttgggcagactggcgactcagagtcagtccccgaccctcaaccaatcggagaaccaccagcagccccctctggtgtgggacctaatacaatggctgcaggcggtggcgctccaatggcagacaataacgaaggcgccgacggagtgggtagttcctcaggaaattggcattgcgattccacatggctgggcgacagagtcatcaccaccagcacccgcacctgggccctgcccacctacaacaaccacctctacaggcaaatctccaacgggacctcgggaggaagcaccaacgacaacacctacttcggctacagcaccccctgggggtattttgacttcaacagattccactgccacttttcaccacgtgactggcagcgactcatcaacaacaactggggattccggcccaagaggctcaacttcaagctcttcaacatccaagtcaaggaggtcacgcagaatgaaggcaccaggaccatcgccaataaccttaccagcacgattcaggtctttacggactcggaataccagctcccgtacgtgctcggctcggcgcaccagggctgcctgcctccgttcccggcggacgtcttcatgattcctcagtacgggtacctgactctgaacaatggcagtcaggctgtgggccggtcgtccttctactgcctggagtactttccttctcaaatgctgagaacgggcaacaactttgaattcagctacaacttcgaggacgtgcccttccacagcagctacgcgcacagccagagcctggaccggctgatgaaccctctcatcgaccagtacttgtactacctgtcccggactcaaagcacgggcggtactgcaggaactcagcagttgctattttctcaggccgggcctaacaacatgtcggctcaggccaagaactggctacccggtccctgctaccggcagcaacgcgtctccacgacactgtcgcagaacaacaacagcaactttgcctggacgggtgccaccaagtatcatctgaatggcagagactctctggtgaatcctggcgttgccatggctacccacagggacgacgaagagcgattttttccatccagcggagtcttaatgtttgggagacagggagctggaagagacaacgtggactatagcagcgtgatgctaaccagcgaggaagaaataaggaccaccaacccagtggccacagaacagtacggcgtggtggccgataacctgcaacagcaaaacgccgctcctattgtaggggccgtcaatagtcaaggagccttacctggcatggtgtggcagaaccgggacgtgtacctgcagggtcccatctgggccaagattcctcatacggacggcaactttcatccctcgccgctgatgggaggctttggactgaagcatccgcctcctcagatcctgattaaaaacacacctgttcccgcggatcctccgaccaccttcaatcaggccaagctggcttctttcatcacgcagtacagtaccggccaggtcagcgtggagatcgagtgggagctgcagaaggagaacagcaaacgctggaacccagagattcagtacacttccaactactacaaatctacaaatgtggactttgctgtcaatactgagggtacttattccgagcctcgccccattggcacccgttacctcacccgtaatctgtaa

SEQ ID NO: 908 - DNA, 2217 bp, Artificial Sequence
  source: /note="Description of Artificial Sequence: Synthetic polynucleotide"
atggctgccgatggttatcttccagattggctcgaggacaacctctctgagggcattcgcgagtggtgggacctgaaacctggagccccgaaacccaaagccaaccagcaaaggcaggacaacggccggggtctggtgcttcctggctacaggtacctcggacccttcaacggactcgacaagggggagcccgtcaacgcggcggacgcagcggccctcgagcacgacagggcctacgaccagcagctccaagcgggtgacaatccgtacctgcggtataatcacgccgacgccgagtttcaggagcgtctgcaagaagatacgtcttttgggggcaacctcgggcgcgcagtcttccaggccaaaaagcgggttctcgaacctctgggcctggttgaatcgccggttaggacggctcctggaaagaagagaccggtagagccatcaccccagcgctctccagactcctctacgggcatcggcaagagaggccagcagcccgcaaaaaagagactcaattttgggcagactggcgactcagagtcagtccccgaccctcaaccaatcggagaaccaccagcagccccctctggtgtgggacctaatacaatggctgcaggcggtggcgctccaatggcagacaataacgaaggcgccgacggagtgggtagttcctcaggaaattggcattgcgattccacatggctgggcgacagagtcatcaccaccagcacccgcacctgggccctgcccacctacaacaaccacctctacaggcaaatctccaacgggacctcgggaggaagcaccaacgacaacacctacttcggctacagcaccccctgggggtattttgacttcaacagattccactgccacttttcaccacgtgactggcagcgactcatcaacaacaactggggattccggcccaagaggctcaacttcaagctcttcaacatccaagtcaaggaggtcacgcagaatgaaggcaccaggaccatcgccaataaccttaccagcacgattcaggtctttacggactcggaataccagctcccgtacgtgctcggctcggcgcaccagggctgcctgcctccgttcccggcggacgtcttcatgattcctcagtacgggtacctgactctgaacaatggcagtcaggctgtgggccggtcgtccttctactgcctggagtactttccttctcaaatgctgagaacgggcaacaactttgaattcagctacaacttcgaggacgtgcccttccacagcagctacgcgcacagccagagcctggaccggctgatgaaccctctcatcgaccagtacttgtactacctgtcccggactcaaagcacgggcggtactgcaggaactcagcagttgctattttctcaggccgggcctaacaacatgtcggctcaggccaagaactggctacccggtccctgctaccggcagcaacgcgtctccacgacactgtcgcagaacaacaacagcaactttgcctggacgggtgccaccaagtatcatctgaatggcagagactctctggtgaatcctggcgttgccatggctacccacagggacgacgaagagcgattttttccatccagcggagtcttaatgtttgggaaacagggagctggaagagacaacgtggactatagcagcgtgatgctaaccagcgaggaagaaataaggaccaccaacccagtggccacagaacagtacggcgtggtggccgataacctgcaacagcaaaacgccgctcctattgtaggggccgtcaatagtcaaggagccttacctggcatggtgtggcagaaccgggacgtgtacctgcagggtcccatctgggccaagattcctcatacggacggcaactttcatccctcgccgctgatgggaggctttggactgaagcatccgcctcctcagatcctgattaaaaacacacctgttcccgcggatcctccgaccaccttcaatcaggccaggctggcttctttcatcacgcagtacagtaccggccaggtcagcgtggagatcgagtgggagctgcagaaggagaacagcaaacgctggaacccagagattcagtacacttccaactactacaaatctacaaatgtggactttgctgtcaatactgagggtacttattccgagcctcgccccattggcacccgttacctcacccgtaatctgtaa

SEQ ID NO: 909 - DNA, 2217 bp, Artificial Sequence
  source: /note="Description of Artificial Sequence: Synthetic polynucleotide"
atggctgccgatggttatcttccagattggctcgaggacaacctctctgagggcattcgcgagtggtgggacctgaaacctggagccccgaaacccaaagccaaccagcaaaggcaggacaacggccggggtctggtgcttcctggctacaggtacctcggacccttcaacggactcgacaagggggagcccgtcaacgcggcggacgcagcggccctcgagcacgacagggcctacgaccagcagctccaagcgggtgacaatccgtacctgcggtataatcacgccgacgccgagtttcaggagcgtctgcaagaagatacgtcttttgggggcaacctcgggcgcgcagtcttccaggccaaaaagcgggttctcgaacctctgggcctggttgaatcgccggttaggacggctcctggaaagaagagaccggtagagccatcaccccagcgctctccagactcctctacgggcatcggcaagaaaggccagcagcccgcaaaaaagagactcaattttgggcagactggcgactcagagtcagtccccgaccctcaaccaatcggagaaccaccagcagccccctctggtgtgggacctaatacaatggctgcaggcggtggcgctccaatggcagacaataacgaaggcgccgacggagtgggtagttcctcaggaaattggcattgcgattccacatggctgggcgacagagtcatcaccaccagcacccgcacctgggccctgcccacctacaacaaccacctctacaggcaaatctccaacgggacctcgggaggaagcaccaacgacaacacctacttcggctacagcaccccctgggggtattttgacttcaacagattccactgccacttttcaccacgtgactggcagcgactcatcaacaacaactggggattccggcccaagaggctcaacttcaagctcttcaacatccaagtcaaggaggtcacgcagaatgaaggcaccaggaccatcgccaataaccttaccagcacgattcaggtctttacggactcggaataccagctcccgtacgtgctcggctcggcgcaccagggctgcctgcctccgttcccggcggacgtcttcatgattcctcagtacgggtacctgactctgaacaatggcagtcaggctgtgggccggtcgtccttctactgcctggagtactttccttctcaaatgctgagaacgggcaacaactttgaattcagctacaacttcgaggacgtgcccttccacagcagctacgcgcacagccagagcctggaccggctgatgaaccctctcatcgaccagtacttgtactacctgtcccggactcaaagcacgggcggtactgcaggaactcagcagttgctattttctcaggccgggcctaacaacatgtcggctcaggccaagaactggctacccggtccctgctaccggcagcaacgcgtctccacgacactgtcgcagaacaacaacagcaactttgcctggacgggtgccaccaagtatcatctgaatggcagagactctctggtgaatcctggcgttgccatggctacccacagggacgacgaagagcgattttttccatccagcggagtcttaatgtttgggagacagggagctggaagagacaacgtggactatagcagcgtgatgctaaccagcgaggaagaaataaggaccaccaacccagtggccacagaacagtacggcgtggtggccgataacctgcaacagcaaaacgccgctcctattgtaggggccgtcaatagtcaaggagccttacctggcatggtgtggcagaaccgggacgtgtacctgcagggtcccatctgggccaagattcctcatacggacggcaactttcatccctcgccgctgatgggaggctttggactgaagcatccgcctcctcagatcctgattaaaaacacacctgttcccgcggatcctccgaccaccttcaatcaggccaggctggcttctttcatcacgcagtacagtaccggccaggtcagcgtggagatcgagtgggagctgcagaaggagaacagcaaacgctggaacccagagattcagtacacttccaactactacaaatctacaaatgtggactttgctgtcaatactgagggtacttattccgagcctcgccccattggcacccgttacctcacccgtaatctgtaa

SEQ ID NO: 910 - protein, 744 aa, Artificial Sequence
  source: /note="Description of Artificial Sequence: Synthetic polypeptide"
MAADGYLPDWLEDTLSEGIRQWWKLKPGPPPPKPAERHKDDSRGLVLPGYKYLGPFNGLDKGEPVNEADAAALEHDKAYDRQLDSGDNPYLKYNHADAEFQERLKEDTSFGGNLGRAVFQAKKRVLEPLGLVEEPVKTAPGKKRPVEHSPVEPDSSSGTGKAGQQPARKRLNFGQTGDADSVPDPQPLGQPPAAPSGLGTNTMATGSGAPMADNNEGADGVGNSSGNWHCDSTWMGDRVITTSTRTWALPTYNNHLYKQISSQSGASNDNHYFGYSTPWGYFDFNRFHCHFSPRDWQRLINNNWGFRPKRLNFKLFNIQVKEVTQNDGTTTIANNLTSTVQVFTDSEYQLPYVLGSAHQGCLPPFPADVFMVPQYGYLTLNNGSQAVGRSSFYCLEYFPSQMLRTGNNFTFSYTFEDVPFHSSYAHSQSLDRLMNPLIDQYLYYLSRTNTPSGTTTQSRLQFSQAGASDIRDQSRNWLPGPCYRQQRVSKTSADNNNSEYSWTGATKYHLNGRDSLVNPGPAMASHKDDEEKFFPQSGVLIFGKQGSEKTNVDIEKVMITDEEEIRTTNPVATEQYGSVSTNLQRGQRGESGHGYFAQAATADVNTQGVLPGMVWQDRDVYLQGPIWAKIPHTDGHFHPSPLMGGFGLKHPPPQILIKNTPVPANPSTTFSAAKFASFITQYSTGQVSVEIEWELQKENSKRWNPEIQYTSNYNKSVNVDFTVDTNGVYSEPRPIGTRYLTRNL

SEQ ID NO: 911 - DNA, 8359 bp, Artificial Sequence
  source: /note="Description of Artificial Sequence: Synthetic polynucleotide"
catcatcaataatataccttattttggattgaagccaatatgataatgagggggtggagtttgtgacgtggcgcggggcgtgggaacggggcgggtgacgtagtagctctagaggtcctgtattagaggtcacgtgagtgttttgcgacattttgcgacaccatgtggtcacgctgggtatttaagcccgagtgagcacgcagggtctccattttgaagcgggaggtttgaacgcgcagccgccatgccggggttttacgagattgtgattaaggtccccagcgaccttgacgagcatctgcccggcatttctgacagctttgtgaactgggtggccgagaaggaatgggagttgccgccagattctgacatggatctgaatctgattgagcaggcacccctgaccgtggccgagaagctgcagcgcgactttctgacggaatggcgccgtgtgagtaaggcaccggaggcccttttctttgtgcaatttgagaagggagagagctacttccacatgcacgtgctcgtggaaaccaccggggtgaaatccatggttttgggacgtttcctgagtcagattcgcgaaaaactgattcagagaatttaccgcgggatcgagccgactttgccaaactggttcgcggtcacaaagaccagaaatggcgccggaggcgggaacaaggtggtggatgagtgctacatccccaattacttgctccccaaaacccagcctgagctccagtgggcgtggactaatatggaacagtatttaagcgcctgtttgaatctcacggagcgtaaacggttggtggcgcagcatctgacgcacgtgtcgcagacgcaggagcagaacaaagagaatcagaatcccaattctgatgcgccggtgatcagatcaaaaacttcagccaggtacatggagctggtcgggtggctcgtggacaaggggattacctcggagaagcagtggatccaggaggaccaggcctcatacatctccttcaatgcggcctccaactcgcggtcccaaatcaaggctgccttggacaatgcgggaaagattatgagcctgactaaaaccgcccccgactacctggtgggccagcagcccgtggaggacatttccagcaatcggatttataaaattttggaactaaacgggtacgatccccaatatgcggcttccgtctttctgggatgggccacgaaaaagttcggcaagaggaacaccatctggctgtttgggcctgcaactaccgggaagaccaacatcgcggaggccatagcccacactgtgcccttctacgggtgcgtaaactggaccaatgagaactttcccttcaacgactgtgtcgacaagatggtgatctggtgggaggaggggaagatgaccgccaaggtcgtggagtcggccaaagccattctcggaggaagcaaggtgcgcgtggaccagaaatgcaagtcctcggcccagatagacccgactcccgtgatcgtcacctccaacaccaacatgtgcgccgtgattgacgggaactcaacgaccttcgaacaccagcagccgttgcaagaccggatgttcaaatttgaactcacccgccgtctggatcatgactttgggaaggtcaccaagcaggaagtcaaagactttttccggtgggcaaaggatcacgtggttgaggtggagcatgaattctacgtcaaaaagggtggagccaagaaaagacccgcccccagtgacgcagatataagtgagcccaaacgggtgcgcgagtcagttgcgcagccatcgacgtcagacgcggaagcttcgatcaactacgcagacaggtaccaaaacaaatgttctcgtcacgtgggcatgaatctgatgctgtttccctgcagacaatgcgagagaatgaatcagaattcaaatatctgcttcactcacggacagaaagactgtttagagtgctttcccgtgtcagaatctcaacccgtttctgtcgtcaaaaaggcgtatcagaaactgtgctacattcatcatatcatgggaaaggtgccagacgcttgcactgcctgcgatctggtcaatgtggatttggatgactgcatctttgaacaataaatgatttaaatcaggtatggctgccgatggttatcttccagattggctcgaggacactctctctgaaggaataagacagtggtggaagctcaaacctggcccaccaccaccaaagcccgcagagcggcataaggacgacagcaggggtcttgtgcttcctgggtacaagtacctcggacccttcaacggactcgacaagggagagccggtcaacgaggcagacgccgcggccctcgagcacgacaaagcctacgaccggcagctcgacagcggagacaacccgtacctcaagtacaaccacgccgacgcggagtttcaggagcgccttaaagaagatacgtcttttgggggcaacctcggacgagcagtcttccaggcgaaaaagagggttcttgaacctctgggcctggttgaggaacctgttaagacggctccgggaaaaaagaggccggtagagcactctcctgtggagccagactcctcctcgggaaccggaaaggcgggccagcagcctgcaagaaaaagattgaattttggtcagactggagacgcagactcagtacctgacccccagcctctcggacagccaccagcagccccctctggtctgggaactaatacgatggctacaggcagtggcgcaccaatggcagacaataacgagggcgccgacggagtgggtaattcctcgggaaattggcattgcgattccacatggatgggcgacagagtcatcaccaccagcacccgaacctgggccctgcccacctacaacaaccacctctacaaacaaatttccagccaatcaggagcctcgaacgacaatcactactttggctacagcaccccttgggggtattttgacttcaacagattccactgccacttttcaccacgtgactggcaaagactcatcaacaacaactggggattccgacccaagagactcaacttcaagctctttaacattcaagtcaaagaggtcacgcagaatgacggtacgacgacgattgccaataaccttaccagcacggttcaggtgtttactgactcggagtaccagctcccgtacgtcctcggctcggcgcatcaaggatgcctcccgccgttcccagcagacgtcttcatggtgccacagtatggatacctcaccctgaacaacgggagtcaggcagtaggacgctcttcattttactgcctggagtactttccttctcagatgctgcgtaccggaaacaactttaccttcagctacacttttgaggacgttcctttccacagcagctacgctcacagccagagtctggaccgtctcatgaatcctctcatcgaccagtacctgtattacttgagcagaacaaacactccaagtggaaccaccacgcagtcaaggcttcagttttctcaggccggagcgagtgacattcgggaccagtctaggaactggcttcctggaccctgttaccgccagcagcgagtatcaaagacatctgcggataacaacaacagtgaatactcgtggactggagctaccaagtaccacctcaatggcagagactctctggtgaatccgggcccggccatggcaagccacaaggacgatgaagaaaagttttttcctcagagcggggttctcatctttgggaagcaaggctcagagaaaacaaatgtggacattgaaaaggtcatgattacagacgaagaggaaatcaggacaaccaatcccgtggctacggagcagtatggttctgtatctaccaacctccagagaggccagagaggcgagtctggtcatggttattttgcccaggcggccaccgcagatgtcaacacacaaggcgttcttccaggcatggtctggcaggacagagatgtgtaccttcaggggcccatctgggcaaagattccacacacggacggacattttcacccctctcccctcatgggtggattcggacttaaacaccctcctccacagattctcatcaagaacaccccggtacctgcgaatccttcgaccaccttcagtgcggcaaagtttgcttccttcatcacacagtactccacgggacaggtcagcgtggagatcgagtgggagctgcagaaggaaaacagcaaacgctggaatcccgaaattcagtacacttccaactacaacaagtctgttaatgtggactttactgtggacactaatggcgtgtattcagagcctcgccccattggcaccagatacctgactcgtaatctgtaattgcttgttaatcaataaaccgtttaattcgtttcagttgaactttggtctctgcgtatttctttcttatctagtttccatgctctagaggtcctgtattagaggtcacgtgagtgttttgcgacattttgcgacaccatgtggtcacgctgggtatttaagcccgagtgagcacgcagggtctccattttgaagcgggaggtttgaacgcgcagccaccacggcggggttttacgagattgtgattaaggtccccagcgaccttgacgagcatctgcccggcatttctgacagctttgtgaactgggtggccgagaaggaatgggagttgccgccagattctgacatggatctgaatctgattgagcaggcacccctgaccgtggccgagaagctgcatcgctggcgtaatagcgaagaggcccgcaccgatcgcccttcccaacagttgcgcagcctgaatggcgaatggcgattccgttgcaatggctggcggtaatattgttctggatattaccagcaaggccgatagtttgagttcttctactcaggcaagtgatgttattactaatcaaagaagtattgcgacaacggttaatttgcgtgatggacagactcttttactcggtggcctcactgattataaaaacacttctcaggattctggcgtaccgttcctgtctaaaatccctttaatcggcctcctgtttagctcccgctctgattctaacgaggaaagcacgttatacgtgctcgtcaaagcaaccatagtacgcgccctgtagcggcgcattaagcgcggcgggtgtggtggttacgcgcagcgtgaccgctacacttgccagcgccctagcgcccgctcctttcgctttcttcccttcctttctcgccacgttcgccggctttccccgtcaagctctaaatcgggggctccctttagggttccgatttagtgctttacggcacctcgaccccaaaaaacttgattagggtgatggttcacgtagtgggccatcgccctgatagacggtttttcgccctttgacgttggagtccacgttctttaatagtggactcttgttccaaactggaacaacactcaaccctatctcggtctattcttttgatttataagggattttgccgatttcggcctattggttaaaaaatgagctgatttaacaaaaatttaacgcgaattttaacaaaatattaacgtttacaatttaaatatttgcttatacaatcttcctgtttttggggcttttctgattatcaaccggggtacatatgattgacatgctagttttacgattaccgttcatcgattctcttgtttgctccagactctcaggcaatgacctgatagcctttgtagagacctctcaaaaatagctaccctctccggcatgaatttatcagctagaacggttgaatatcatattgatggtgatttgactgtctccggcctttctcacccgtttgaatctttacctacacattactcaggcattgcatttaaaatatatgagggttctaaaaatttttatccttgcgttgaaataaaggcttctcccgcaaaagtattacagggtcataatgtttttggtacaaccgatttagctttatgctctgaggctttattgcttaattttgctaattctttgccttgcctgtatgatttattggatgttggaattcctgatgcggtattttctccttacgcatctgtgcggtatttcacaccgcatatggtgcactctcagtacaatctgctctgatgccgcatagttaagccagccccgacacccgccaacacccgctgacgcgccctgacgggcttgtctgctcccggcatccgcttacagacaagctgtgaccgtctccgggagctgcatgtgtcagaggttttcaccgtcatcaccgaaacgcgcgagacgaaagggcctcgtgatacgcctatttttataggttaatgtcatgataataatggtttcttagacgtcaggtggcacttttcggggaaatgtgcgcggaacccctatttgtttatttttctaaatacattcaaatatgtatccgctcatgagacaataaccctgataaatgcttcaataatattgaaaaaggaagagtatgagtattcaacatttccgtgtcgcccttattcccttttttgcggcattttgccttcctgtttttgctcacccagaaacgctggtgaaagtaaaagatgctgaagatcagttgggtgcacgagtgggttacatcgaactggatctcaacagcggtaagatccttgagagttttcgccccgaagaacgttttccaatgatgagcacttttaaagttctgctatgtggcgcggtattatcccgtattgacgccgggcaagagcaactcggtcgccgcatacactattctcagaatgacttggttgagtactcaccagtcacagaaaagcatcttacggatggcatgacagtaagagaattatgcagtgctgccataaccatgagtgataacactgcggccaacttacttctgacaacgatcggaggaccgaaggagctaaccgcttttttgcacaacatgggggatcatgtaactcgccttgatcgttgggaaccggagctgaatgaagccataccaaacgacgagcgtgacaccacgatgcctgtagcaatggcaacaacgttgcgcaaactattaactggcgaactacttactctagcttcccggcaacaattaatagactggatggaggcggataaagttgcaggaccacttctgcgctcggcccttccggctggctggtttattgctgataaatctggagccggtgagcgtgggtctcgcggtatcattgcagcactggggccagatggtaagccctcccgtatcgtagttatctacacgacggggagtcaggcaactatggatgaacgaaatagacagatcgctgagataggtgcctcactgattaagcattggtaactgtcagaccaagtttactcatatatactttagattgatttaaaacttcatttttaatttaaaaggatctaggtgaagatcctttttgataatctcatgaccaaaatcccttaacgtgagttttcgttccactgagcgtcagaccccgtagaaaagatcaaaggatcttcttgagatcctttttttctgcgcgtaatctgctgcttgcaaacaaaaaaaccaccgctaccagcggtggtttgtttgccggatcaagagctaccaactctttttccgaaggtaactggcttcagcagagcgcagataccaaatactgtccttctagtgtagccgtagttaggccaccacttcaagaactctgtagcaccgcctacatacctcgctctgctaatcctgttaccagtggctgctgccagtggcgataagtcgtgtcttaccgggttggactcaagacgatagttaccggataaggcgcagcggtcgggctgaacggggggttcgtgcacacagcccagcttggagcgaacgacctacaccgaactgagatacctacagcgtgagctatgagaaagcgccacgcttcccgaagggagaaaggcggacaggtatccggtaagcggcagggtcggaacaggagagcgcacgagggagcttccagggggaaacgcctggtatctttatagtcctgtcgggtttcgccacctctgacttgagcgtcgatttttgtgatgctcgtcaggggggcggagcctatggaaaaacgccagcaacgcggcctttttacggttcctggccttttgctggccttttgctcacatgttctttcctgcgttatcccctgattctgtggataaccgtattaccgcctttgagtgagctgataccgctcgccgcagccgaacgaccgagcgcagcgagtcagtgagcgaggaagcggaagagcgcccaatacgcaaaccgcctctccccgcgcgttggccgattcattaatgcagaattcc

SEQ ID NO: 912 - protein, 736 aa, Artificial Sequence
  source: /note="Description of Artificial Sequence: Synthetic polypeptide"
  VARIANT (168)..(168): /replace="Arg"
  VARIANT (204)..(204): /replace="Ser"
  VARIANT (266)..(266): /replace="Gly"
  VARIANT (311)..(311): /replace="Lys"
  VARIANT (411)..(411): /replace="Gln"
  VARIANT (460)..(460): /replace="Glu"
  VARIANT (493)..(493): /replace="Thr"
  VARIANT (562)..(562): /replace="Asn"
  VARIANT (576)..(576): /replace="Glu"
  VARIANT (587)..(587): /replace="Ala"
  VARIANT (609)..(609): /replace="Asp"
  SITE (1)..(736): /note="Variant residues given in the sequence have no preference with respect to those in the annotations for variant positions"
MAADGYLPDWLEDNLSEGIREWWDLKPGAPKPKANQQKQDDGRGLVLPGYKYLGPFNGLDKGEPVNAADAAALEHDKAYDQQLKAGDNPYLRYNHADAEFQERLQEDTSFGGNLGRAVFQAKKRVLEPLGLVEEGAKTAPGKKRPVEQSPQEPDSSSGIGKKGQQPAKKRLNFGQTGDSESVPDPQPLGEPPAAPSGVGSNTMAAGGGAPMADNNEGADGVGNASGNWHCDSTWLGDRVITTSTRTWALPTYNNHLYKQISSQSGASTNDNTYFGYSTPWGYFDFNRFHCHFSPRDWQRLINNNWGFRPKRLNFKLFNIQVKEVTTNDGTTTIANNLTSTVQVFTDSEYQLPYVLGSAHQGCLPPFPADVFMIPQYGYLTLNNGSQAVGRSSFYCLEYFPSQMLRTGNNFEFSYTFEDVPFHSSYAHSQSLDRLMNPLIDQYLYYLSRTQTTSGTAGNRTLQFSQAGPSSMANQAKNWLPGPCYRQQRVSKTANQNNNSNFAWTGATKYHLNGRDSLVNPGPAMATHKDDEDKFFPMSGVLIFGKQGAGNSNVDLDNVMITSEEEIKTTNPVATEQYGTVATNLQSSNTAPATGTVNSQGALPGMVWQNRDVYLQGPIWAKIPHTDGHFHPSPLMGGFGLKHPPPQILIKNTPVPANPPTTFSPAKFASFITQYSTGQVSVEIEWELQKENSKRWNPEIQYTSNYNKSTNVDFAVDTNGVYSEPRPIGTRYLTRNL

SEQ ID NO: 913 - DNA, 2208 bp, Artificial Sequence
  source: /note="Description of Artificial Sequence: Synthetic polynucleotide"
  variation (502)..(504): /replace="agg"
  variation (610)..(612): /replace="agc"
  variation (796)..(798): /replace="ggc"
  variation (931)..(933): /replace="aag"
  variation (1231)..(1233): /replace="cag"
  variation (1378)..(1380): /replace="gag"
  variation (1477)..(1479): /replace="acc"
  variation (1684)..(1686): /replace="aac"
  variation (1726)..(1728): /replace="gag"
  variation (1759)..(1761): /replace="gcc"
  variation (1825)..(1827): /replace="gac"
  misc_feature (1)..(2208): /note="Variant nucleotides given in the sequence have no preference with respect to those in the annotations for variant positions"
atggctgccgatggttatcttccagattggctcgaggacaacctctctgagggcattcgcgagtggtgggacttgaaacctggagccccgaaacccaaagccaaccagcaaaagcaggacgacggccggggtctggtgcttcctggctacaagtacctcggacccttcaacggactcgacaagggggagcccgtcaacgcggcggacgcagcggccctcgagcacgacaaggcctacgaccagcagctcaaagcgggtgacaatccgtacctgcggtataaccacgccgacgccgagtttcaggagcgtctgcaagaagatacgtcttttgggggcaacctcgggcgagcagtcttccaggccaagaagcgggttctcgaacctctcggtctggttgaggaaggcgctaagacggctcctggaaagaagagaccggtagagcaatcaccccaggaaccagactcctcttcgggcatcggcaagaaaggccagcagcccgcgaagaagagactcaactttgggcagacaggcgactcagagtcagtgcccgaccctcaaccactcggagaaccccccgcagccccctctggtgtgggatctaatacaatggcagcaggcggtggcgctccaatggcagacaataacgaaggcgccgacggagtgggtaacgcctcaggaaattggcattgcgattccacatggctgggcgacagagtcatcaccaccagcacccgaacctgggccctccccacctacaacaaccacctctacaagcaaatctccagccaatcgggagcaagcaccaacgacaacacctacttcggctacagcaccccctgggggtattttgactttaacagattccactgccacttctcaccacgtgactggcagcgactcatcaacaacaactggggattccggcccaagagactcaacttcaagctcttcaacatccaggtcaaggaggtcacgacgaatgatggcaccacgaccatcgccaataaccttaccagcacggttcaggtctttacggactcggaataccagctcccgtacgtcctcggctctgcgcaccagggctgcctgcctccgttcccggcggacgtcttcatgattcctcagtacgggtacctgactctgaacaatggcagtcaggccgtgggccgttcctccttctactgcctggagtactttccttctcaaatgctgagaacgggcaacaactttgagttcagctacacgtttgaggacgtgccttttcacagcagctacgcgcacagccaaagcctggaccggctgatgaaccccctcatcgaccagtacctgtactacctgtctcggactcagaccacgagtggtaccgcaggaaatcggacgttgcaattttctcaggccgggcctagtagcatggcgaatcaggccaaaaactggctacccgggccctgctaccggcagcaacgcgtctccaagacagcgaatcaaaataacaacagcaactttgcctggaccggtgccaccaagtatcatctgaatggcagagactctctggtaaatcccggtcccgctatggcaacccacaaggacgacgaagacaaattttttccgatgagcggagtcttaatatttgggaaacagggagctggaaatagcaacgtggaccttgacaacgttatgataaccagtgaggaagaaattaaaaccaccaacccagtggccacagaacagtacggcacggtggccactaacctgcaatcgtcaaacaccgctcctgctacagggaccgtcaacagtcaaggagccttacctggcatggtctggcagaaccgggacgtgtacctgcagggtcctatctgggccaagattcctcacacggacggacactttcatccctcgccgctgatgggaggctttggactgaaacacccgcctcctcagatcctgattaagaatacacctgttcccgcgaatcctccaactaccttcagtccagctaagtttgcgtcgttcatcacgcagtacagcaccggacaggtcagcgtggaaattgaatgggagctgcagaaagaaaacagcaaacgctggaacccagagattcaatacacttccaactacaacaaatctacaaatgtggactttgctgttgacacaaatggcgtttattctgagcctcgccccatcggcacccgttacctcacccgtaatctg

SEQ ID NO: 914 - protein, 737 aa, Artificial Sequence
  source: /note="Description of Artificial Sequence: Synthetic polypeptide"
  VARIANT (157)..(157): /replace="Ser"
  VARIANT (168)..(168): /replace="Arg"
  VARIANT (262)..(262): /replace="Ser"
  VARIANT (263)..(263): /replace="His"
  VARIANT (312)..(312): /replace="Lys"
  VARIANT (412)..(412): /replace="Gln"
  VARIANT (460)..(460): /replace="Gln"
  VARIANT (461)..(461): /replace="Glu"
  VARIANT (552)..(552): /replace="Ser"
  VARIANT (556)..(556): /replace="Tyr"
  VARIANT (557)..(557): /replace="Ser"
  VARIANT (563)..(563): /replace="Asn"
  VARIANT (580)..(580): /replace="Ile"
  VARIANT (588)..(588): /replace="Ser"
  VARIANT (664)..(664): /replace="Thr"
  SITE (1)..(737): /note="Variant residues given in the sequence have no preference with respect to those in the annotations for variant positions"
MAADGYLPDWLEDNLSEGIREWWDLKPGAPKPKANQQKQDDGRGLVLPGYKYLGPFNGLDKGEPVNAADAAALEHDKAYDQQLKAGDNPYLRYNHADAEFQERLQEDTSFGGNLGRAVFQAKKRVLEPLGLVEEGAKTAPGKKRPVEQSPQEPDSSTGIGKKGQQPAKKRLNFGQTGDSESVPDPQPLGEPPAAPSGVGSNTMAAGGGAPMADNNEGADGVGNASGNWHCDSTWLGDRVITTSTRTWALPTYNNHLYKQISNSQSGGSTNDNTYFGYSTPWGYFDFNRFHCHFSPRDWQRLINNNWGFRPKRLNFKLFNIQVKEVTTNDGTTTIANNLTSTVQVFTDSEYQLPYVLGSAHQGCLPPFPADVFMIPQYGYLTLNNGSQAVGRSSFYCLEYFPSQMLRTGNNFEFSYTFEDVPFHSSYAHSQSLDRLMNPLIDQYLYYLSRTQTTGGTAGNRTLQFSQAGPSSMANQAKNWLPGPCYRQQRVSKTTNQNNNSNFAWTGATKYHLNGRDSLVNPGVAMATHKDDEDRFFPSSGVLIFGKQGAGNDNVDLDNVMITSEEEIKTTNPVATEEYGVVATNLQSANTAPQTGTVNSQGALPGMVWQNRDVYLQGPIWAKIPHTDGNFHPSPLMGGFGLKHPPPQILIKNTPVPANPPTTFSPAKFASFITQYSTGQVSVEIEWELQKENSKRWNPEIQYTSNYNKSTNVDFAVDTEGVYSEPRPIGTRYLTRNL

SEQ ID NO: 915 - DNA, 2211 bp, Artificial Sequence
  source: /note="Description of Artificial Sequence: Synthetic polynucleotide"
  variation (469)..(471): /replace="agc"
  variation (502)..(504): /replace="aga"
  variation (784)..(786): /replace="agt"
  variation (787)..(789): /replace="cac"
  variation (934)..(936): /replace="aag"
  variation (1234)..(1236): /replace="cag"
  variation (1378)..(1380): /replace="cag"
  variation (1381)..(1383): /replace="gag"
  variation (1654)..(1656): /replace="agc"
  variation (1666)..(1668): /replace="tac"
  variation (1669)..(1671): /replace="agc"
  variation (1687)..(1689): /replace="aac"
  variation (1738)..(1740): /replace="atc"
  variation (1762)..(1764): /replace="agc"
  variation (1990)..(1992): /replace="acc"
  misc_feature (1)..(2211): /note="Variant nucleotides given in the sequence have no preference with respect to those in the annotations for variant positions"
atggctgccgatggttatcttccagattggctcgaggacaacctctctgagggcattcgcgagtggtgggacttgaaacctggagccccgaaacccaaagccaaccagcaaaagcaggacgacggccggggtctggtgcttcctggctacaagtacctcggacccttcaacggactcgacaagggggagcccgtcaacgcggcggacgcagcggccctcgagcacgacaaggcctacgaccagcagctcaaagcgggtgacaatccgtacctgcggtataaccacgccgacgccgagtttcaggagcgtctgcaagaagatacgtcttttgggggcaacctcgggcgagcagtcttccaggccaagaagcgggttctcgaacctctcggtctggttgaggaaggcgctaagacggctcctggaaagaagagaccggtagagcaatcaccccaggaaccagactcctctacgggcatcggcaagaaaggccagcagcccgcgaaaaagagactcaactttgggcagactggcgactcagagtcagtgcccgaccctcaaccactcggagaaccccccgcagccccctctggtgtgggatctaatacaatggctgcaggcggtggcgctccaatggcagacaataacgaaggcgccgacggagtgggtaatgcctcaggaaattggcattgcgattccacatggctgggcgacagagtcatcaccaccagcacccgaacctgggccctccccacctacaacaaccacctctacaagcaaatctccaacagccaatcgggaggaagcaccaacgacaacacctacttcggctacagcaccccctgggggtattttgactttaacagattccactgccacttctcaccacgtgactggcagcgactcatcaacaacaactggggattccggcccaagagactcaacttcaagctcttcaacatccaggtcaaggaggtcacgacgaatgatggcaccacgaccatcgccaataaccttaccagcacggttcaggtctttacggactcggaataccagctcccgtacgtcctcggctctgcgcaccagggctgcctgcctccgttcccggcggacgtcttcatgattcctcagtacgggtacctgactctgaacaatggcagtcaggccgtgggccgttcctccttctactgcctggagtactttccttctcaaatgctgagaacgggcaacaactttgagttcagctacacgtttgaggacgtgccttttcacagcagctacgcgcacagccaaagcctggaccggctgatgaaccccctcatcgaccagtacctgtactacctgtctcggactcagaccacgggaggtaccgcaggaaatcggacgttgcaattttctcaggccgggcctagtagcatggcgaatcaggccaaaaactggctacccgggccctgctaccggcagcaacgcgtctccaagacaacgaatcaaaataacaacagcaactttgcctggaccggtgccaccaagtatcatctgaatggcagagactctctggtaaatcccggtgtcgctatggcaacccacaaggacgacgaagaccgattttttccgtccagcggagtcttaatatttgggaaacagggagctggaaatgacaacgtggaccttgacaacgttatgataaccagtgaggaagaaattaaaaccaccaacccagtggccacagaagagtacggcgtggtggccactaacctgcaatcggcaaacaccgctcctcaaacagggaccgtcaacagtcaaggagccttacctggcatggtctggcagaaccgggacgtgtacctgcagggtcctatctgggccaagattcctcacacggacggaaactttcatccctcgccgctgatgggaggctttggactgaaacacccgcctcctcagatcctgattaagaatacacctgttcccgcgaatcctccaactaccttcagtccagctaagtttgcgtcgttcatcacgcagtacagcaccggacaggtcagcgtggaaattgaatgggagctgcagaaagaaaacagcaaacgctggaacccagagattcaatacacttccaactacaacaaatctacaaatgtggactttgctgttgacacagaaggcgtttattctgagcctcgccccatcggcacccgttacctcacccgtaatctg

SEQ ID NO: 916 - protein, 738 aa, Artificial Sequence
  source: /note="Description of Artificial Sequence: Synthetic polypeptide"
  VARIANT (158)..(158): /replace="Ser"
  VARIANT (169)..(169): /replace="Arg"
  VARIANT (564)..(564): /replace="Asn"
  SITE (1)..(738): /note="Variant residues given in the sequence have no preference with respect to those in the annotations for variant positions"
MAADGYLPDWLEDNLSEGIREWWDLKPGAPKPKANQQKQDDGRGLVLPGYKYLGPFNGLDKGEPVNAADAAALEHDKAYDQQLKAGDNPYLRYNHADAEFQERLQEDTSFGGNLGRAVFQAKKRVLEPLGLVEEGAKTAPGKKRPVEQSPQREPDSSTGIGKKGQQPAKKRLNFGQTGDSESVPDPQPLGEPPAAPSGVGSNTMAAGGGAPMADNNEGADGVGNSSGNWHCDSTWLGDRVITTSTRTWALPTYNNHLYKQISNGTSGGSTNDNTYFGYSTPWGYFDFNRFHCHFSPRDWQRLINNNWGFRPKRLNFKLFNIQVKEVTTNEGTKTIANNLTSTVQVFTDSEYQLPYVLGSAHQGCLPPFPADVFMIPQYGYLTLNNGSQAVGRSSFYCLEYFPSQMLRTGNNFQFSYTFEDVPFHSSYAHSQSLDRLMNPLIDQYLYYLSRTQTTGGTAGTQTLQFSQAGPSSMANQAKNWLPGPCYRQQRVSTTTNQNNNSNFAWTGATKYHLNGRDSLVNPGVAMATHKDDEDRFFPSSGVLIFGKQGAGNDNVDYSNVMITSEEEIKTTNPVATEEYGVVATNLQSANTAPQTGTVNSQGALPGMVWQNRDVYLQGPIWAKIPHTDGNFHPSPLMGGFGLKHPPPQILIKNTPVPADPPTTFNQAKLNSFITQYSTGQVSVEIEWELQKENSKRWNPEIQYTSNYYKSTNVDFAVNTEGVYSEPRPIGTRYLTRNL

SEQ ID NO: 917 - DNA, 2214 bp, Artificial Sequence
  source: /note="Description of Artificial Sequence: Synthetic polynucleotide"
  variation (472)..(474): /replace="agc"
  variation (505)..(507): /replace="aga"
  variation (1690)..(1692): /replace="aac"
  misc_feature (1)..(2214): /note="Variant nucleotides given in the sequence have no preference with respect to those in the annotations for variant positions"
atggctgccgatggttatcttccagattggctcgaggacaacctctctgagggcattcgcgagtggtgggacctgaaacctggagccccgaaacccaaagccaaccagcaaaagcaggacgacggccggggtctggtgcttcctggctacaagtacctcggacccttcaacggactcgacaagggggagcccgtcaacgcggcggacgcagcggccctcgagcacgacaaggcctacgaccagcagctcaaagcgggtgacaatccgtacctgcggtataatcacgccgacgccgagtttcaggagcgtctgcaagaagatacgtcttttgggggcaacctcgggcgagcagtcttccaggccaagaagcgggttctcgaacctctcggtctggttgaggaaggcgctaagacggctcctggaaagaagagaccggtagagcagtcaccacagcgtgagcccgactcctccacgggcatcggcaagaaaggccagcagcccgccaaaaagagactcaatttcggtcagactggcgactcagagtcagtccccgaccctcaacctctcggagaacctccagcagcgccctctggtgtgggatctaatacaatggctgcaggcggtggcgcaccaatggcagacaataacgaaggtgccgacggagtgggtaattcctcgggaaattggcattgcgattccacatggctgggcgacagagtcatcaccaccagcacccgaacctgggccctgcccacctacaacaaccacctctacaagcaaatctccaacgggacctcgggaggcagcaccaacgacaacacctactttggctacagcaccccctgggggtattttgactttaacagattccactgccacttctcaccacgtgactggcagcgactcatcaacaacaactggggattccggcccaagagactcaacttcaagctcttcaacatccaggtcaaagaggtcacgacgaatgaaggcaccaagaccatcgccaataacctcaccagcaccgtccaggtgtttacggactcggaataccagctgccgtacgtcctcggctctgcccaccagggctgcctgcctccgttcccggcggacgtcttcatgattcctcagtacggctacctgactctcaacaacggtagtcaggccgtgggacgttcctccttctactgcctggagtacttcccctctcagatgctgagaacgggcaacaactttcaattcagctacactttcgaggacgtgcctttccacagcagctacgcgcacagccagagtttggacaggctgatgaatcctctcatcgaccagtacctgtactacctgtcaagaacccagactacgggaggcacagcgggaacccagacgttgcagttttctcaggccgggcctagcagcatggcgaatcaggccaaaaactggctgcctggaccctgctacagacagcagcgcgtctccacgacaacgaatcaaaacaacaacagcaactttgcctggactggtgccaccaagtatcatctgaacggcagagactctctggtgaatccgggcgtcgccatggcaacccacaaggacgacgaggaccgcttcttcccatccagcggcgtcctcatatttggcaagcagggagctggaaatgacaacgtggactatagcaacgtgatgataaccagcgaggaagaaatcaagaccaccaaccccgtggccacagaagagtatggcgtggtggctactaacctacagtcggcaaacaccgctcctcaaacggggaccgtcaacagccagggagccttacctggcatggtctggcagaaccgggacgtgtacctgcagggtcctatttgggccaagattcctcacacagatggcaactttcacccgtctcctttaatgggcggctttggacttaaacatccgcctcctcagatcctcatcaaaaacactcctgttcctgcggatcctccaacaacgttcaaccaggccaagctgaattctttcatcacgcagtacagcaccggacaagtcagcgtggagatcgagtgggagctgcagaaggagaacagcaagcgctggaacccagagattcagtatacttccaactactacaaatctacaaatgtggactttgctgttaatactgagggtgtttactctgagcctcgccccattggcactcgttacctcacccgtaatctg

SEQ ID NO: 918 - protein, 738 aa, Artificial Sequence
  source: /note="Description of Artificial Sequence: Synthetic polypeptide"
  VARIANT (158)..(158): /replace="Ser"
  VARIANT (169)..(169): /replace="Lys"
  VARIANT (315)..(315): /replace="Ser"
  VARIANT (413)..(413): /replace="Glu"
  VARIANT (472)..(472): /replace="Thr" or "Ser"
  VARIANT (534)..(534): /replace="Glu"
  VARIANT (542)..(542): /replace="Val"
  VARIANT (595)..(595): /replace="Val"
  SITE (1)..(738): /note="Variant residues given in the sequence have no preference with respect to those in the annotations for variant positions"
MAADGYLPDWLEDNLSEGIREWWDLKPGAPKPKANQQKQDDGRGLVLPGYKYLGPFNGLDKGEPVNAADAAALEHDKAYDQQLKAGDNPYLRYNHADAEFQERLQEDTSFGGNLGRAVFQAKKRVLEPLGLVEEGAKTAPGKKRPVEQSPQREPDSSTGIGKKGQQPARKRLNFGQTGDSESVPDPQPLGEPPAAPSGVGSNTMAAGGGAPMADNNEGADGVGSSSGNWHCDSTWLGDRVITTSTRTWALPTYNNHLYKQISNGTSGGSTNDNTYFGYSTPWGYFDFNRFHCHFSPRDWQRLINNNWGFRPKRLNFKLFNIQVKEVTQNEGTKTIANNLTSTIQVFTDSEYQLPYVLGSAHQGCLPPFPADVFMIPQYGYLTLNNGSQAVGRSSFYCLEYFPSQMLRTGNNFQFSYTFEDVPFHSSYAHSQSLDRLMNPLIDQYLYYLSRTQTTGGTAGTQTLQFSQAGPSNMANQAKNWLPGPCYRQQRVSTTTSQNNNSNFAWTGATKYHLNGRDSLVNPGVAMATHKDDEDRFFPSSGILIFGKQGAGKDNVDYSNVMLTSEEEIKTTNPVATEEYGVVADNLQQQNTAPQIGTVNSQGALPGMVWQNRDVYLQGPIWAKIPHTDGNFHPSPLMGGFGLKHPPPQILIKNTPVPADPPTTFNQAKLNSFITQYSTGQVSVEIEWELQKENSKRWNPEIQYTSNYYKSTNVDFAVNTEGVYSEPRPIGTRYLTRNL

SEQ ID NO: 919 - DNA, 2214 bp, Artificial Sequence
  source: /note="Description of Artificial Sequence: Synthetic polynucleotide"
  variation (472)..(474): /replace="agc"
  variation (505)..(507): /replace="aag"
  variation (943)..(945): /replace="agc"
  variation (1237)..(1239): /replace="gaa"
  variation (1414)..(1416): /replace="aac" or "agc"
  variation (1600)..(1602): /replace="gag"
  variation (1624)..(1626): /replace="gtc"
  variation (1783)..(1785): /replace="gta"
  misc_feature (1)..(2214): /note="Variant nucleotides given in the sequence have no preference with respect to those in the annotations for variant positions"
atggctgccgatggttatcttccagattggctcgaggacaacctctctgagggcattcgcgagtggtgggacctgaaacctggagccccgaaacccaaagccaaccagcaaaagcaggacgacggccggggtctggtgcttcctggctacaagtacctcggacccttcaacggactcgacaagggggagcccgtcaacgcggcggacgcagcggccctcgagcacgacaaggcctacgaccagcagctcaaagcgggtgacaatccgtacctgcggtataatcacgccgacgccgagtttcaggagcgtctgcaagaagatacgtcttttgggggcaacctcgggcgagcagtcttccaggccaagaagcgggttctcgaacctctcggtctggttgaggaaggcgctaagacggctcctggaaagaagagaccggtagagcagtcaccacagcgtgagcccgactcctccacgggcatcggcaagaaaggccagcagcccgccagaaagagactcaatttcggtcagactggcgactcagagtcagtccccgaccctcaacctctcggagaacctccagcagcgccctctggtgtgggatctaatacaatggctgcaggcggtggcgcaccaatggcagacaataacgaaggtgccgacggagtgggtagttcctcgggaaattggcattgcgattccacatggctgggcgacagagtcatcaccaccagcacccgaacctgggccctgcccacctacaacaaccacctctacaagcaaatctccaacgggacctcgggaggcagcaccaacgacaacacctactttggctacagcaccccctgggggtattttgactttaacagattccactgccacttctcaccacgtgactggcagcgactcatcaacaacaactggggattccggcccaagagactcaacttcaagctcttcaacatccaggtcaaagaggtcacgcagaatgaaggcaccaagaccatcgccaataacctcaccagcaccatccaggtgtttacggactcggaataccagctgccgtacgtcctcggctctgcccaccagggctgcctgcctccgttcccggcggacgtcttcatgattcctcagtacggctacctgactctcaacaacggtagtcaggccgtgggacgttcctccttctactgcctggagtacttcccctctcagatgctgagaacgggcaacaactttcaattcagctacactttcgaggacgtgcctttccacagcagctacgcgcacagccagagtttggacaggctgatgaatcctctcatcgaccagtacctgtactacctgtcaagaacccagactacgggaggcacagcgggaacccagacgttgcagttttctcaggccgggcctagcaccatggcgaatcaggccaaaaactggctgcctggaccctgctacagacagcagcgcgtctccacgacaacgtcgcaaaacaacaacagcaactttgcctggactggtgccaccaagtatcatctgaacggcagagactctctggtgaatccgggcgtcgccatggcaacccacaaggacgacgaggaccgcttcttcccatccagcggcatcctcatatttggcaagcagggagctggaaaagacaacgtggactatagcaacgtgatgctaaccagcgaggaagaaatcaagaccaccaaccccgtggccacagaagagtatggcgtggtggctgataacctacagcagcaaaacaccgctcctcaaatagggaccgtcaacagccagggagccttacctggcatggtctggcagaaccgggacgtgtacctgcagggtcctatttgggccaagattcctcacacagatggcaactttcacccgtctcctttaatgggcggctttggacttaaacatccgcctcctcagatcctcatcaaaaacactcctgttcctgcggatcctccaacaacgttcaaccaggccaagctgaattctttcatcacgcagtacagcaccggacaagtcagcgtggagatcgagtgggagctgcagaaggagaacagcaagcgctggaacccagagattcagtatacttccaactactacaaatctacaaatgtggactttgctgttaatactgagggtgtttactctgagcctcgccccattggcactcgttacctcacccgtaatctg

SEQ ID NO: 920 - protein, 738 aa, Artificial Sequence
  source: /note="Description of Artificial Sequence: Synthetic polypeptide"
  VARIANT (169)..(169): /replace="Lys"
  VARIANT (315)..(315): /replace="Ser"
  VARIANT (534)..(534): /replace="Glu"
  VARIANT (542)..(542): /replace="Val"
  SITE (1)..(738): /note="Variant residues given in the sequence have no preference with respect to those in the annotations for variant positions"
MAADGYLPDWLEDNLSEGIREWWDLKPGAPKPKANQQKQDDGRGLVLPGYKYLGPFNGLDKGEPVNAADAAALEHDKAYDQQLKAGDNPYLRYNHADAEFQERLQEDTSFGGNLGRAVFQAKKRVLEPLGLVEEGAKTAPGKKRPVEPSPQRSPDSSTGIGKKGQQPARKRLNFGQTGDSESVPDPQPIGEPPAAPSGVGSGTMAAGGGAPMADNNEGADGVGSSSGNWHCDSTWLGDRVITTSTRTWALPTYNNHLYKQISNGTSGGSTNDNTYFGYSTPWGYFDFNRFHCHFSPRDWQRLINNNWGFRPKRLNFKLFNIQVKEVTQNEGTKTIANNLTSTIQVFTDSEYQLPYVLGSAHQGCLPPFPADVFMIPQYGYLTLNNGSQAVGRSSFYCLEYFPSQMLRTGNNFEFSYTFEDVPFHSSYAHSQSLDRLMNPLIDQYLYYLSRTQSTGGTAGTQQLLFSQAGPSNMSAQAKNWLPGPCYRQQRVSTTLSQNNNSNFAWTGATKYHLNGRDSLVNPGVAMATHKDDEDRFFPSSGILMFGKQGAGKDNVDYSNVMLTSEEEIKTTNPVATEQYGVVADNLQQQNTAPIVGAVNSQGALPGMVWQNRDVYLQGPIWAKIPHTDGNFHPSPLMGGFGLKHPPPQILIKNTPVPADPPTTFNQAKLNSFITQYSTGQVSVEIEWELQKENSKRWNPEIQYTSNYYKSTNVDFAVNTEGVYSEPRPIGTRYLTRNL

SEQ ID NO: 921 - DNA, 2214 bp, Artificial Sequence
  source: /note="Description of Artificial Sequence: Synthetic polynucleotide"
  variation (505)..(507): /replace="aaa"
  variation (943)..(945): /replace="agc"
  variation (1600)..(1602): /replace="gag"
  variation (1624)..(1626): /replace="gtc"
  misc_feature (1)..(2214): /note="Variant nucleotides given in the sequence have no preference with respect to those in the annotations for variant positions"
atggctgccgatggttatcttccagattggctcgaggacaacctctctgagggcattcgcgagtggtgggacctgaaacctggagccccgaaacccaaagccaaccagcaaaagcaggacgacggccggggtctggtgcttcctggctacaagtacctcggacccttcaacggactcgacaagggggagcccgtcaacgcggcggacgcagcggccctcgagcacgacaaggcctacgaccagcagctcaaagcgggtgacaatccgtacctgcggtataatcacgccgacgccgagtttcaggagcgtctgcaagaagatacgtcttttgggggcaacctcgggcgagcagtcttccaggccaagaagcgggttctcgaacctctcggtctggttgaggaaggcgctaagacggctcctggaaagaagagaccggtagagccgtcaccacagcgttcccccgactcctccacgggcatcggcaagaaaggccagcagcccgccagaaagagactcaatttcggtcagactggcgactcagagtcagtccccgaccctcaacctatcggagaacctccagcagcgccctctggtgtgggatctggtacaatggctgcaggcggtggcgcaccaatggcagacaataacgaaggtgccgacggagtgggtagttcctcgggaaattggcattgcgattccacatggctgggcgacagagtcatcaccaccagcacccgaacctgggccctgcccacctacaacaaccacctctacaagcaaatctccaacgggacctcgggaggcagcaccaacgacaacacctactttggctacagcaccccctgggggtattttgactttaacagattccactgccacttctcaccacgtgactggcagcgactcatcaacaacaactggggattccggcccaagagactcaacttcaagctcttcaacatccaggtcaaagaggtcacgcagaatgaaggcaccaagaccatcgccaataacctcaccagcaccatccaggtgtttacggactcggaataccagctgccgtacgtcctcggctctgcccaccagggctgcctgcctccgttcccggcggacgtcttcatgattcctcagtacggctacctgactctcaacaacggtagtcaggccgtgggacgttcctccttctactgcctggagtacttcccctctcagatgctgagaacgggcaacaactttgagttcagctacactttcgaggacgtgcctttccacagcagctacgcgcacagccagagtttggacaggctgatgaatcctctcatcgaccagtacctgtactacctgtcaagaacccagtctacgggaggcacagcgggaacccagcagttgctgttttctcaggccgggcctagcaacatgtcggctcaggccaaaaactggctgcctggaccctgctacagacagcagcgcgtctccacgacactgtcgcaaaacaacaacagcaactttgcctggactggtgccaccaagtatcatctgaacggcagagactctctggtgaatccgggcgtcgccatggcaacccacaaggacgacgaggaccgcttcttcccatccagcggcatcctcatgtttggcaagcagggagctggaaaagacaacgtggactatagcaacgtgatgctaaccagcgaggaagaaatcaagaccaccaaccccgtggccacagaacagtatggcgtggtggctgataacctacagcagcaaaacaccgctcctattgtgggggccgtcaacagccagggagccttacctggcatggtctggcagaaccgggacgtgtacctgcagggtcctatttgggccaagattcctcacacagatggcaactttcacccgtctcctttaatgggcggctttggacttaaacatccgcctcctcagatcctcatcaaaaacactcctgttcctgcggatcctccaacaacgttcaaccaggccaagctgaattctttcatcacgcagtacagcaccggacaagtcagcgtggagatcgagtgggagctgcagaaggagaacagcaagcgctggaacccagagattcagtatacttccaactactacaaatctacaaatgtggactttgctgttaatactgagggtgtttactctgagcctcgccccattggcactcgttacctcacccgtaatctg

SEQ ID NO: 922 - protein, 738 aa, Artificial Sequence
  source: /note="Description of Artificial Sequence: Synthetic polypeptide"
  VARIANT (471)..(471): /replace="Asn"
  SITE (1)..(738): /note="Variant residues given in the sequence have no preference with respect to those in the annotations for variant positions"
MAADGYLPDWLEDNLSEGIREWWDLKPGAPKPKANQQKQDDGRGLVLPGYKYLGPFNGLDKGEPVNAADAAALEHDKAYDQQLKAGDNPYLRYNHADAEFQERLQEDTSFGGNLGRAVFQAKKRVLEPLGLVEEGAKTAPGKKRPVEPSPQRSPDSSTGIGKKGQQPAKKRLNFGQTGDSESVPDPQPIGEPPAGPSGLGSGTMAAGGGAPMADNNEGADGVGSSSGNWHCDSTWLGDRVITTSTRTWALPTYNNHLYKQISNGTSGGSTNDNTYFGYSTPWGYFDFNRFHCHFSPRDWQRLINNNWGFRPKRLNFKLFNIQVKEVTQNEGTKTIANNLTSTIQVFTDSEYQLPYVLGSAHQGCLPPFPADVFMIPQYGYLTLNNGSQAVGRSSFYCLEYFPSQMLRTGNNFEFSYTFEDVPFHSSYAHSQSLDRLMNPLIDQYLYYLSRTQSTGGTAGTQQLLFSQAGPSNMSAQAKNWLPGPCYRQQRVSTTLSQNNNSNFAWTGATKYHLNGRDSLVNPGVAMATHKDDEERFFPSSGVLMFGKQGAGKDNVDYSSVMLTSEEEIKTTNPVATEQYGVVADNLQQQNTAPIVGAVNSQGALPGMVWQNRDVYLQGPIWAKIPHTDGNFHPSPLMGGFGLKHPPPQILIKNTPVPADPPTTFSQAKLASFITQYSTGQVSVEIEWELQKENSKRWNPEIQYTSNYYKSTNVDFAVNTEGTYSEPRPIGTRYLTRNL

SEQ ID NO: 923 - DNA, 2214 bp, Artificial Sequence
  source: /note="Description of Artificial Sequence: Synthetic polynucleotide"
  variation (1411)..(1413): /replace="aat"
  misc_feature (1)..(2214): /note="Variant nucleotides given in the sequence have no preference with respect to those in the annotations for variant positions"
atggctgccgatggttatcttccagattggctcgaggacaacctctctgagggcattcgcgagtggtgggacttgaaacctggagccccgaaacccaaagccaaccagcaaaagcaggacgacggccggggtctggtgcttcctggctacaagtacctcggacccttcaacggactcgacaagggggagcccgtcaacgcggcggacgcagcggccctcgagcacgacaaggcctacgaccagcagctcaaagcgggtgacaatccgtacctgcggtataaccacgccgacgccgagtttcaggagcgtctgcaagaagatacgtcttttgggggcaacctcgggcgagcagtcttccaggccaagaagcgggttctcgaacctctcggtctggttgaggaaggcgctaagacggctcctggaaagaagagaccggtagagccatcaccccagcgttctccagactcctctacgggcatcggcaagaaaggccagcagcccgcgaaaaagagactcaactttgggcagactggcgactcagagtcagtgcccgaccctcaaccaatcggagaaccccccgcaggcccctctggtctgggatctggtacaatggctgcaggcggtggcgctccaatggcagacaataacgaaggcgccgacggagtgggtagttcctcaggaaattggcattgcgattccacatggctgggcgacagagtcatcaccaccagcacccgaacctgggccctccccacctacaacaaccacctctacaagcaaatctccaacgggacttcgggaggaagcaccaacgacaacacctacttcggctacagcaccccctgggggtattttgactttaacagattccactgccacttctcaccacgtgactggcagcgactcatcaacaacaactggggattccggcccaagagactcaacttcaagctcttcaacatccaggtcaaggaggtcacgcagaatgaaggcaccaagaccatcgccaataaccttaccagcacgattcaggtctttacggactcggaataccagctcccgtacgtcctcggctctgcgcaccagggctgcctgcctccgttcccggcggacgtcttcatgattcctcagtacgggtacctgactctgaacaatggcagtcaggccgtgggccgttcctccttctactgcctggagtactttccttctcaaatgctgagaacgggcaacaactttgagttcagctacacgtttgaggacgtgccttttcacagcagctacgcgcacagccaaagcctggaccggctgatgaaccccctcatcgaccagtacctgtactacctgtctcggactcagtccacgggaggtaccgcaggaactcagcagttgctattttctcaggccgggcctagtaacatgtcggctcaggccaaaaactggctacccgggccctgctaccggcagcaacgcgtctccacgacactgtcgcaaaataacaacagcaactttgcctggaccggtgccaccaagtatcatctgaatggcagagactctctggtaaatcccggtgtcgctatggcaacccacaaggacgacgaagagcgattttttccgtccagcggagtcttaatgtttgggaaacagggagctggaaaagacaacgtggactatagcagcgttatgctaaccagtgaggaagaaattaaaaccaccaacccagtggccacagaacagtacggcgtggtggccgataacctgcaacagcaaaacaccgctcctattgtaggggccgtcaacagtcaaggagccttacctggcatggtctggcagaaccgggacgtgtacctgcagggtcctatctgggccaagattcctcacacggacggaaactttcatccctcgccgctgatgggaggctttggactgaaacacccgcctcctcagatcctgattaagaatacacctgttcccgcggatcctccaactaccttcagtcaagctaagctggcgtcgttcatcacgcagtacagcaccggacaggtcagcgtggaaattgaatgggagctgcagaaagaaaacagcaaacgctggaacccagagattcaatacacttccaactactacaaatctacaaatgtggactttgctgttaacacagaaggcacttattctgagcctcgccccatcggcacccgttacctcacccgtaatctg

SEQ ID NO: 924 - protein, 737 aa, Artificial Sequence
  source: /note="Description of Artificial Sequence: Synthetic polypeptide"
  VARIANT (148)..(148): /replace="Gln"
  VARIANT (169)..(169): /replace="Arg"
  VARIANT (314)..(314): /replace="Asn"
  VARIANT (466)..(466): /replace="His"
  VARIANT (563)..(563): /replace="Ser"
  VARIANT (580)..(580): /replace="Ile"
  VARIANT (588)..(588): /replace="Ser"
  SITE (1)..(737): /note="Variant residues given in the sequence have no preference with respect to those in the annotations for variant positions"
MAADGYLPDWLEDNLSEGIREWWDLKPGAPKPKANQQKQDDGRGLVLPGYKYLGPFNGLDKGEPVNAADAAALEHDKAYDQQLKAGDNPYLRYNHADAEFQERLQEDTSFGGNLGRAVFQAKKRVLEPLGLVEEGAKTAPGKKRPVEPSPQRSPDSSTGIGKKGQQPAKKRLNFGQTGDSESVPDPQPLGEPPAAPSGVGSGTMAAGGGAPMADNNEGADGVGNASGNWHCDSTWLGDRVITTSTRTWALPTYNNHLYKQISSQSAGSTNDNTYFGYSTPWGYFDFNRFHCHFSPRDWQRLINNNWGFRPKKLRFKLFNIQVKEVTTNDGVTTIANNLTSTVQVFSDSEYQLPYVLGSAHQGCLPPFPADVFMIPQYGYLTLNNGSQSVGRSSFYCLEYFPSQMLRTGNNFEFSYTFEDVPFHSSYAHSQSLDRLMNPLIDQYLYYLARTQSTTGGTAGNRELQFYQAGPSTMAEQAKNWLPGPCYRQQRVSKTLDQNNNSNFAWTGATKYHLNGRNSLVNPGVAMATHKDDEDRFFPSSGVLIFGKTGAANKTTLENVLMTNEEEIKTTNPVATEEYGVVSSNLQSANTAPQTQTVNSQGALPGMVWQNRDVYLQGPIWAKIPHTDGNFHPSPLMGGFGLKHPPPQILIKNTPVPANPPEVFTPAKFASFITQYSTGQVSVEIEWELQKENSKRWNPEIQYTSNYDKSTNVDFAVDSEGVYSEPRPIGTRYLTRNL

SEQ ID NO: 925 - DNA, 2211 bp, Artificial Sequence
  source: /note="Description of Artificial Sequence: Synthetic polynucleotide"
  variation (442)..(444): /replace="cag"
  variation (505)..(507): /replace="aga"
  variation (940)..(942): /replace="aac"
  variation (1396)..(1398): /replace="cac"
  variation (1687)..(1689): /replace="agt"
  variation (1738)..(1740): /replace="ata"
  variation (1762)..(1764): /replace="tct"
  misc_feature (1)..(2211): /note="Variant nucleotides given in the sequence have no preference with respect to those in the annotations for variant positions"
atggctgccgatggttatcttccagattggctcgaggacaacctctctgagggcattcgcgagtggtgggacctgaaacctggagccccgaaacccaaagccaaccagcaaaagcaggacgacggccggggtctggtgcttcctggctacaagtacctcggacccttcaacggactcgacaagggggagcccgtcaacgcggcggacgcagcggccctcgagcacgacaaggcctacgaccagcagctcaaagcgggtgacaatccgtacctgcggtataaccacgccgacgccgagtttcaggagcgtctgcaagaagatacgtcatttgggggcaacctcgggcgagcagtcttccaggccaagaagcgggttctcgaacctctcggtctggttgaggaaggcgctaagacggctcctggaaagaagagaccggtagagccgtcacctcagcgttcccccgactcctccacgggcatcggcaagaaaggccagcagcccgccaaaaagagactcaatttcggtcagactggcgactcagagtcagtccccgaccctcaacctctcggagaacctccagcagcgccctctggtgtgggatctggtacaatggctgcaggcggtggcgcaccaatggcagacaataacgaaggtgccgacggagtgggtaatgcctcaggaaattggcattgcgattccacatggctgggcgacagagtcattaccaccagcacccgaacctgggccctgcccacctacaacaaccacctctacaagcaaatctccagtcaaagtgcaggtagtaccaacgacaacacctacttcggctacagcaccccctgggggtattttgactttaacagattccactgccacttctcaccacgtgactggcagcgactcatcaacaacaactggggattccggcccaagaagctgcggttcaagctcttcaacatccaggtcaaggaggtcacgacgaatgacggcgttacgaccatcgctaataaccttaccagcacggttcaggtattctcggactcggaataccagctgccgtacgtcctcggctctgcgcaccagggctgcctgcctccgttcccggcggacgtcttcatgattcctcagtacggctacctgactctcaacaatggcagtcagtctgtgggacgttcctccttctactgcctggagtacttcccctctcagatgctgagaacgggcaacaactttgagttcagctacaccttcgaggacgtgcctttccacagcagctacgcacacagccagagcctggaccggctgatgaatcccctcatcgaccagtacttgtactacctggccagaacacagagtaccacaggaggcacagctggcaatcgggaactgcagttttaccaggccgggccttcaactatggccgaacaagccaagaattggttacctggaccttgctaccggcaacaaagagtctccaaaacgctggatcaaaacaacaacagcaactttgcttggactggtgccaccaaatatcacctgaacggcagaaactcgttggttaatcccggcgtcgccatggcaactcacaaggacgacgaggaccgctttttcccatccagcggagtcctgatttttggaaaaactggagcagctaacaaaactacattggaaaatgtgttaatgacaaatgaagaagaaattaaaactactaatcctgtagccacggaagaatacggggtagtcagcagcaacttacaatcggctaatactgcaccccagacacaaactgtcaacagccagggagccttacctggcatggtctggcagaaccgggacgtgtacctgcagggtcccatctgggccaagattcctcacacggatggcaactttcacccgtctcctttgatgggcggctttggacttaaacatccgcctcctcagatcctgatcaagaacactcccgttcccgctaatcctccggaggtgtttactcctgccaagtttgcttcgttcatcacacagtacagcaccggacaagtcagcgtggaaatcgagtgggagctgcagaaggaaaacagcaagcgctggaacccggagattcagtacacctccaactatgataagtcgactaatgtggactttgccgttgacagcgagggtgtttactctgagcctcgccctattggcactcgttacctcacccgtaatctg

SEQ ID NO: 926 - protein, 735 aa, Artificial Sequence
  source: /note="Description of Artificial Sequence: Synthetic polypeptide"
  VARIANT (162)..(162): /replace="Thr"
  VARIANT (168)..(168): /replace="Arg"
  VARIANT (224)..(224): /replace="Ser"
  VARIANT (310)..(310): /replace="Lys"
  VARIANT (410)..(410): /replace="Gln"
  VARIANT (446)..(446): /replace="Asn"
  VARIANT (461)..(461): /replace="Leu"
  VARIANT (471)..(471): /replace="Ser"
  VARIANT (708)..(708): /replace="Thr"
  SITE (1)..(735): /note="Variant residues given in the sequence have no preference with respect to those in the annotations for variant positions"
MAADGYLPDWLEDNLSEGIREWWDLKPGAPKPKANQQKQDDGRGLVLPGYKYLGPFNGLDKGEPVNAADAAALEHDKAYDQQLKAGDNPYLRYNHADAEFQERLQEDTSFGGNLGRAVFQAKKRVLEPLGLVEEGAKTAPGKKRPVEQSPQEPDSSSGIGKSGQQPAKKRLNFGQTGDSESVPDPQPLGEPPAAPSGVGSNTMASGGGAPMADNNEGADGVGNASGNWHCDSTWLGDRVITTSTRTWALPTYNNHLYKQISSQSGASNDNHYFGYSTPWGYFDFNRFHCHFSPRDWQRLINNNWGFRPKRLNFKLFNIQVKEVTTNDGTTTIANNLTSTVQVFTDSEYQLPYVLGSAHQGCLPPFPADVFMIPQYGYLTLNNGSQAVGRSSFYCLEYFPSQMLRTGNNFTFSYTFEDVPFHSSYAHSQSLDRLMNPLIDQYLYYLSRTQTTSGTAQNRELQFSQAGPSSMANQAKNWLPGPCYRQQRVSKTANDNNNSNFAWTGATKYHLNGRDSLVNPGPAMASHKDDEDKFFPMSGVLIFGKQGAGASNVDLDNVMITDEEEIKTTNPVATEQYGTVATNLQSSNTAPATGTVNSQGALPGMVWQDRDVYLQGPIWAKIPHTDGHFHPSPLMGGFGLKHPPPQILIKNTPVPANPPTTFSPAKFASFITQYSTGQVSVEIEWELQKENSKRWNPEIQYTSNYNKSANVDFTVDTNGVYSEPRPIGTRYLTRNL

SEQ ID NO: 927 - DNA, 2205 bp, Artificial Sequence
  source: /note="Description of Artificial Sequence: Synthetic polynucleotide"
  variation (484)..(486): /replace="aca"
  variation (502)..(504): /replace="aga"
  variation (670)..(672): /replace="tcc"
  variation (928)..(930): /replace="aaa"
  variation (1228)..(1230): /replace="cag"
  variation (1336)..(1338): /replace="aac"
  variation (1381)..(1383): /replace="ctg"
  variation (1411)..(1413): /replace="tct"
  variation (2122)..(2124): /replace="acc"
  misc_feature (1)..(2205): /note="Variant nucleotides given in the sequence have no preference with respect to those in the annotations for variant positions"
atggctgccgatggttatcttccagattggctcgaggacaacctctctgagggcattcgcgagtggtgggacttgaaacctggagccccgaaacccaaagccaaccagcaaaagcaggacgacggccggggtctggtgcttcctggctacaagtacctcggacccttcaacggactcgacaagggggagcccgtcaacgcggcggatgcagcggccctcgagcacgacaaggcctacgaccagcagctcaaagcgggtgacaatccgtacctgcggtataaccacgccgacgccgagtttcaggagcgtctgcaagaagatacgtcttttgggggcaacctcgggcgagcagtcttccaggccaagaagagggttctcgaacctcttggtctggttgaggaaggtgctaagacggctcctggaaagaaacgtccggtagagcagtcgccacaagagccagactcctcctcgggcattggcaagtcaggccagcagcccgctaaaaagagactcaattttggtcagactggcgactcagagtcagtccccgacccacaacctctcggagaacctccagcagccccctctggtgtgggatctaatacaatggcttcaggcggtggcgcaccaatggcagacaataacgaaggcgccgacggagtgggtaatgcctcaggaaattggcattgcgattccacatggctgggcgacagagtcatcaccaccagcacccgaacatgggccttgcccacctataacaaccacctctacaagcaaatctccagtcaatcaggggccagcaacgacaaccactacttcggctacagcaccccctgggggtattttgatttcaacagattccactgccatttctcaccacgtgactggcagcgactcatcaacaacaattggggattccggcccaagagactcaacttcaagctcttcaacatccaagtcaaggaggtcacgacgaatgatggcaccacgaccatcgctaataaccttaccagcacggttcaagtcttcacggactcggagtaccagttgccgtacgtcctcggctctgcgcaccagggctgcctccctccgttcccggcggacgtgttcatgattccgcagtacggctacctaacgctcaacaatggcagccaggcagtgggacggtcatccttttactgcctggaatatttcccatcgcagatgctgagaacgggcaataactttaccttcagctacaccttcgaggacgtgcctttccacagcagctacgcgcacagccagagcctggaccggctgatgaatcctctcatcgaccagtacctgtattacctgagcagaactcagactacgtccggaactgcccaaaacagggagttgcagtttagccaggcgggtccatctagcatggctaatcaggccaaaaactggctacctggaccctgttaccggcagcagcgcgtttctaaaacagcaaatgacaacaacaacagcaactttgcctggactggtgctacaaaatatcaccttaatgggcgtgattctttagtcaaccctggccctgctatggcctcacacaaagacgacgaagacaagttctttcccatgagcggtgtcttgatttttggaaagcagggcgccggagcttcaaacgttgatttggacaatgtcatgatcacagacgaagaggaaatcaaaaccactaaccccgtggccaccgaacaatatgggactgtggcaaccaatctccagagcagcaacacagcccctgcgaccggaactgtgaattctcagggagccttacctggaatggtgtggcaagacagagacgtatacctgcagggtcctatttgggccaaaattcctcacacggatggacactttcacccgtctcctctcatgggcggctttggacttaagcacccgcctcctcagatcctcatcaaaaacacgcctgttcctgcgaatcctccgacaacgttttcgcctgcaaagtttgcttcattcatcacccagtattccacaggacaagtgagcgtggagattgaatgggagctgcagaaagaaaacagcaaacgctggaatcccgaaatacagtatacatctaactataataaatctgccaacgttgatttcactgtggacaccaatggagtttatagtgagcctcgccccattggcacccgttacctcacccgtaacctg

SEQ ID NO: 928 - protein, 735 aa, Artificial Sequence
  source: /note="Description of Artificial Sequence: Synthetic polypeptide"
  VARIANT (42)..(42): /replace="Ser"
  VARIANT (168)..(168): /replace="Lys"
  VARIANT (310)..(310): /replace="Arg"
  VARIANT (410)..(410): /replace="Gln"
  VARIANT (446)..(446): /replace="Arg"
  VARIANT (461)..(461): /replace="Leu"
  VARIANT (471)..(471): /replace="Ser"
  VARIANT (475)..(475): /replace="Arg"
  VARIANT (504)..(504): /replace="Ala"
  VARIANT (539)..(539): /replace="Asn"
  SITE (1)..(735): /note="Variant residues given in the sequence have no preference with respect to those in the annotations for variant positions"
MAADGYLPDWLEDNLSEGIREWWDLKPGAPQPKANQQHQDDGRGLVLPGYKYLGPFNGLDKGEPVNEADAAALEHDKAYDQQLKAGDNPYLKYNHADAEFQERLQEDTSFGGNLGRAVFQAKKRVLEPLGLVEEAAKTAPGKKRPVEQSPQEPDSSSGIGKSGQQPARKRLNFGQTGDSESVPDPQPLGEPPAAPSGVGSNTMASGGGAPMADNNEGADGVGNSSGNWHCDSTWLGDRVITTSTRTWALPTYNNHLYKQISSQSGASNDNHYFGYSTPWGYFDFNRFHCHFSPRDWQRLINNNWGFRPKKLNFKLFNIQVKEVTQNDGTTTIANNLTSTVQVFTDSEYQLPYVLGSAHQGCLPPFPADVFMIPQYGYLTLNNGSQAVGRSSFYCLEYFPSQMLRTGNNFTFSYTFEDVPFHSSYAHSQSLDRLMNPLIDQYLYYLSRTQTTSGTTQQSRLQFSQAGPSSMAQQAKNWLPGPCYRQQRVSKTANDNNNSNFAWTGATKYHLNGRDSLVNPGPAMASHKDDEEKFFPMHGVLIFGKQGTGASNVDLDNVMITDEEEIRTTNPVATEQYGTVATNLQSSNTAPATGTVNSQGALPGMVWQDRDVYLQGPIWAKIPHTDGHFHPSPLMGGFGLKHPPPQILIKNTPVPANPPTTFSPAKFASFITQYSTGQVSVEIEWELQKENSKRWNPEIQYTSNYNKSVNVDFTVDTNGVYSEPRPIGTRYLTRNL

SEQ ID NO: 929 - DNA, 2205 bp, Artificial Sequence
  source: /note="Description of Artificial Sequence: Synthetic polynucleotide"
  variation (124)..(126): /replace="agt"
  variation (502)..(504): /replace="aaa"
  variation (928)..(930): /replace="aga"
  variation (1228)..(1230): /replace="cag"
  variation (1336)..(1338): /replace="aga"
  variation (1381)..(1383): /replace="ctc"
  variation (1411)..(1413): /replace="tct"
  variation (1423)..(1425): /replace="aga"
  variation (1510)..(1512): /replace="gcg"
  variation (1615)..(1617): /replace="aac"
  misc_feature (1)..(2205): /note="Variant nucleotides given in the sequence have no preference with respect to those in the annotations for variant positions"
atggctgctgacggttatcttccagattggctcgaggacaacctttctgaaggcattcgtgagtggtgggatctgaaacctggagcccctcaacccaaagcgaaccaacaacaccaggacgacggtcggggtcttgtgcttccgggttacaaatacctcggaccctttaacggactcgacaaaggagagccggtcaacgaggcggacgcggcagccctcgaacacgacaaagcttacgaccagcagctcaaggccggtgacaacccgtacctcaagtacaaccacgccgacgccgagtttcaggagcgtcttcaagaagatacgtcttttgggggcaaccttggcagagcagtcttccaggccaaaaagagggtccttgagcctcttggtctggttgaggaagcagctaaaacggctcctggaaagaagaggcctgtagaacagtctcctcaggaaccggactcatcatctggtattggcaaatcgggccaacagcctgccagaaaaagactaaatttcggtcagactggagactcagagtcagtcccagaccctcaacctctcggagaaccaccagcagccccctcaggtgtgggatctaatacaatggcttcaggcggtggcgcaccaatggcagacaataacgagggtgccgatggagtgggtaattcctcaggaaattggcattgcgattccacatggctgggcgacagagtcatcaccaccagcaccagaacctgggccctgcccacttacaacaaccatctctacaagcaaatctccagccaatcaggagcttcaaacgacaaccactactttggctacagcaccccttgggggtattttgactttaacagattccactgccacttctcaccacgtgactggcagcgactcattaacaacaactggggattccggcccaagaaactcaacttcaagctcttcaacatccaagttaaagaggtcacgcagaacgatggcacgacgactattgccaataaccttaccagcacggttcaagtgtttacggactcggagtatcagctcccgtacgtgctcgggtcggcgcaccaaggctgtctcccgccgtttccagcggacgtcttcatgatccctcagtatggatacctcaccctgaacaacggaagtcaagcggtgggacgctcatccttttactgcctggagtacttcccttcgcagatgctaaggactggaaataacttcacattcagctataccttcgaggatgtaccttttcacagcagctacgctcacagccagagtttggatcgcttgatgaatcctcttattgatcagtatctgtactacctgagcagaacgcaaacaacctctggaacaacccaacaatcacggctgcaatttagccaggctgggccttcgtctatggctcagcaggccaaaaattggctacctgggccctgctaccggcaacagagagtttcaaagactgctaacgacaacaacaacagtaactttgcttggacaggggccaccaaatatcatctcaatggccgcgactcgctggtgaatccaggaccagctatggccagtcacaaggacgatgaagaaaaatttttccctatgcacggcgttctaatatttggcaaacaagggacaggggcaagtaacgtagatttagataatgtaatgattacggatgaagaagagattcgtaccaccaatcctgtggcaacagagcagtatggaactgtggcaactaacttgcagagctcaaatacagctcccgcgactggaactgtcaatagtcagggggccttacctggcatggtgtggcaagatcgtgacgtgtaccttcaaggacctatctgggcaaagattcctcacacggatggacactttcatccttctcctctgatgggaggctttggactgaaacatccgcctcctcaaatcttgatcaaaaatactccggtaccggcaaatcctccgacgactttcagcccggccaagtttgcttcatttatcactcagtactccactggacaggtcagcgtggaaattgagtgggagctacagaaagaaaacagcaaacgttggaatccagagattcagtacacttccaactacaacaagtctgttaatgtggactttactgtagacactaatggtgtttatagtgaacctcgccctattggaacccggtatctcacacgaaacttg

SEQ ID NO: 930 - protein, 736 aa, Artificial Sequence
  source: /note="Description of Artificial Sequence: Synthetic polypeptide"
MAADGYLPDWLEDNLSEGIREWWDLKPGAPKPKANQQKQDDGRGLVLPGYKYLGPFNGLDKGEPVNAADAAALEHDKAYDQQLKAGDNPYLRYNHADAEFQERLQEDTSFGGNLGRAVFQAKKRVLEPLGLVEEGAKTAPGKKRPVEQSPQEPDSSSGIGKKGQQPARKRLNFGQTGDSESVPDPQPLGEPPAAPSGVGSNTMAAGGGAPMADNNEGADGVGNASGNWHCDSTWLGDRVITTSTRTWALPTYNNHLYKQISSQSGGSTNDNTYFGYSTPWGYFDFNRFHCHFSPRDWQRLINNNWGFRPKRLNFKLFNIQVKEVTTNDGTTTIANNLTSTVQVFTDSEYQLPYVLGSAHQGCLPPFPADVFMIPQYGYLTLNNGSQAVGRSSFYCLEYFPSQMLRTGNNFEFSYTFEDVPFHSSYAHSQSLDRLMNPLIDQYLYYLSRTQTTSGTAGNRTLQFSQAGPSSMANQAKNWLPGPCYRQQRVSKTANQNNNSNFAWTGATKYHLNGRDSLVNPGPAMATHKDDEDKFFPMSGVLIFGKQGAGNSNVDLDNVMITNEEEIKTTNPVATEQYGTVATNLQSANTAPATGTVNSQGALPGMVWQDRDVYLQGPIWAKIPHTDGHFHPSPLMGGFGLKHPPPQILIKNTPVPANPPTTFSPAKFASFITQYSTGQVSVEIEWELQKENSKRWNPEIQYTSNYNKSTNVDFAVDTNGVYSEPRPIGTRYLTRNL

SEQ ID NO: 931 - protein, 736 aa, Artificial Sequence
  source: /note="Description of Artificial Sequence: Synthetic polypeptide"
MAADGYLPDWLEDNLSEGIREWWDLKPGAPKPKANQQKQDDGRGLVLPGYKYLGPFNGLDKGEPVNAADAAALEHDKAYDQQLKAGDNPYLRYNHADAEFQERLQEDTSFGGNLGRAVFQAKKRVLEPLGLVEEGAKTAPGKKRPVEQSPQEPDSSSGIGKKGQQPAKKRLNFGQTGDSESVPDPQPLGEPPAAPSGVGSNTMASGGGAPMADNNEGADGVGNASGNWHCDSTWLGDRVITTSTRTWALPTYNNHLYKQISSQSGASTNDNTYFGYSTPWGYFDFNRFHCHFSPRDWQRLINNNWGFRPKRLNFKLFNIQVKEVTTNDGTTTIANNLTSTVQVFTDSEYQLPYVLGSAHQGCLPPFPADVFMIPQYGYLTLNNGSQAVGRSSFYCLEYFPSQMLRTGNNFQFSYTFEDVPFHSSYAHSQSLDRLMNPLIDQYLYYLSRTQTTSGTAGNRELQFSQAGPSSMANQAKNWLPGPCYRQQRVSKTTNQNNNSNFAWTGATKYHLNGRDSLVNPGPAMATHKDDEDKFFPMSGVLIFGKQGAGNSNVDLDNVMITNEEEIKTTNPVATEEYGTVATNLQSANTAPATGTVNSQGALPGMVWQNRDVYLQGPIWAKIPHTDGHFHPSPLMGGFGLKHPPPQILIKNTPVPANPPTTFSPAKFASFITQYSTGQVSVEIEWELQKENSKRWNPEIQYTSNYNKSTNVDFAVDTNGVYSEPRPIGTRYLTRNL

SEQ ID NO: 932 - protein, 736 aa, Artificial Sequence
  source: /note="Description of Artificial Sequence: Synthetic polypeptide"
MAADGYLPDWLEDNLSEGIREWWDLKPGAPKPKANQQKQDDGRGLVLPGYKYLGPFNGLDKGEPVNAADAAALEHDKAYDQQLKAGDNPYLRYNHADAEFQERLQEDTSFGGNLGRAVFQAKKRVLEPLGLVEEGAKTAPGKKRPVEQSPQEPDSSSGIGKKGQQPARKRLNFGQTGDSESVPDPQPLGEPPAAPSGVGSNTMAAGGGAPMADNNEGADGVGNASGNWHCDSTWLGDRVITTSTRTWALPTYNNHLYKQISSQSGGSTNDNTYFGYSTPWGYFDFNRFHCHFSPRDWQRLINNNWGFRPKRLNFKLFNIQVKEVTTNDGTTTIANNLTSTVQVFTDSEYQLPYVLGSAHQGCLPPFPADVFMIPQYGYLTLNNGSQAVGRSSFYCLEYFPSQMLRTGNNFEFSYTFEDVPFHSSYAHSQSLDRLMNPLIDQYLYYLSRTQTTSGTAGNRELQFSQAGPSSMANQAKNWLPGPCYRQQRVSKTTNQNNNSNFAWTGATKYHLNGRDSLVNPGPAMATHKDDEDKFFPMSGVLIFGKQGAGNSNVDLDNVMITSEEEIKTTNPVATEEYGTVATNLQSSNTAPATGTVNSQGALPGMVWQERDVYLQGPIWAKIPHTDGHFHPSPLMGGFGLKHPPPQILIKNTPVPANPPTTFSPAKFASFITQYSTGQVSVEIEWELQKENSKRWNPEIQYTSNYNKSTNVDFAVDTNGVYSEPRPIGTRYLTRNL

SEQ ID NO: 933 - protein, 736 aa, Artificial Sequence
  source: /note="Description of Artificial Sequence: Synthetic polypeptide"
MAADGYLPDWLEDNLSEGIREWWDLKPGAPKPKANQQKQDDGRGLVLPGYKYLGPFNGLDKGEPVNAADAAALEHDKAYDQQLKAGDNPYLRYNHADAEFQERLQEDTSFGGNLGRAVFQAKKRVLEPLGLVEEGAKTAPGKKRPVEQSPQEPDSSSGIGKKGQQPARKRLNFGQTGDSESVPDPQPLGEPPAAPSGVGSNTMASGGGAPMADNNEGADGVGNASGNWHCDSTWLGDRVITTSTRTWALPTYNNHLYKQISSQSGGSTNDNTYFGYSTPWGYFDFNRFHCHFSPRDWQRLINNNWGFRPKKLNFKLFNIQVKEVTTNDGTTTIANNLTSTVQVFTDSEYQLPYVLGSAHQGCLPPFPADVFMIPQYGYLTLNNGSQAVGRSSFYCLEYFPSQMLRTGNNFEFSYTFEDVPFHSSYAHSQSLDRLMNPLIDQYLYYLSRTQTTSGTAGNRELQFSQAGPSSMANQAKNWLPGPCYRQQRVSKTTNQNNNSNFAWTGATKYHLNGRDSLVNPGPAMATHKDDEDKFFPMSGVLIFGKQGAGNSNVDLDNVMITSEEEIKTTNPVATEEYGTVATNLQSANTAPATGTVNSQGALPGMVWQDRDVYLQGPIWAKIPHTDGHFHPSPLMGGFGLKHPPPQILIKNTPVPANPPTTFSPAKFASFITQYSTGQVSVEIEWELQKENSKRWNPEIQYTSNYNKSTNVDFAVDTNGVYSEPRPIGTRYLTRNL

SEQ ID NO: 934 - protein, 736 aa, Artificial Sequence
  source: /note="Description of Artificial Sequence: Synthetic polypeptide"
MAADGYLPDWLEDNLSEGIREWWDLKPGAPKPKANQQKQDDGRGLVLPGYKYLGPFNGLDKGEPVNAADAAALEHDKAYDQQLKAGDNPYLRYNHADAEFQERLQEDTSFGGNLGRAVFQAKKRVLEPLGLVEEGAKTAPGKKRPVEQSPQEPDSSSGIGKKGQQPARKRLNFGQTGDSESVPDPQPLGEPPAAPSGVGSNTMAAGGGAPMADNNEGADGVGNASGNWHCDSTWLGDRVITTSTRTWALPTYNNHLYKQISSQSGGSTNDNTYFGYSTPWGYFDFNRFHCHFSPRDWQRLINNNWGFRPKKLNFKLFNIQVKEVTTNDGTTTIANNLTSTVQVFTDSEYQLPYVLGSAHQGCLPPFPADVFMIPQYGYLTLNNGSQAVGRSSFYCLEYFPSQMLRTGNNFQFSYTFEDVPFHSSYAHSQSLDRLMNPLIDQYLYYLSRTQTTSGTAGNRTLQFSQAGPSSMANQAKNWLPGPCYRQQRVSKTTNQNNNSNFAWTGATKYHLNGRDSLVNPGPAMATHKDDEDKFFPMSGVLIFGKQGAGNSNVDLDNVMITNEEEIKTTNPVATEEYGTVATNLQSANTAPATGTVNSQGALPGMVWQDRDVYLQGPIWAKIPHTDGHFHPSPLMGGFGLKHPPPQILIKNTPVPANPPTTFSPAKFASFITQYSTGQVSVEIEWELQKENSKRWNPEIQYTSNYNKSTNVDFAVDTNGVYSEPRPIGTRYLTRNL

SEQ ID NO: 935 - protein, 736 aa, Artificial Sequence
  source: /note="Description of Artificial Sequence: Synthetic polypeptide"
MAADGYLPDWLEDNLSEGIREWWDLKPGAPKPKANQQKQDDGRGLVLPGYKYLGPFNGLDKGEPVNAADAAALEHDKAYDQQLKAGDNPYLRYNHADAEFQERLQEDTSFGGNLGRAVFQAKKRVLEPLGLVEEGAKTAPGKKRPVEQSPQEPDSSSGIGKKGQQPAKKRLNFGQTGDSESVPDPQPLGEPPAAPSGVGSNTMAAGGGAPMADNNEGADGVGNASGNWHCDSTWLGDRVITTSTRTWALPTYNNHLYKQISSQSGGSTNDNTYFGYSTPWGYFDFNRFHCHFSPRDWQRLINNNWGFRPKKLNFKLFNIQVKEVTTNDGTTTIANNLTSTVQVFTDSEYQLPYVLGSAHQGCLPPFPADVFMIPQYGYLTLNNGSQAVGRSSFYCLEYFPSQMLRTGNNFEFSYTFEDVPFHSSYAHSQSLDRLMNPLIDQYLYYLSRTQTTSGTAGNRTLQFSQAGPSSMANQAKNWLPGPCYRQQRVSKTANQNNNSNFAWTGATKYHLNGRDSLVNPGPAMATHKDDEDKFFPMSGVLIFGKQGAGNSNVDLDNVMITSEEEIKTTNPVATEQYGTVATNLQSSNTAPATGTVNSQGALPGMVWQNRDVYLQGPIWAKIPHTDGHFHPSPLMGGFGLKHPPPQILIKNTPVPANPPTTFSPAKFASFITQYSTGQVSVEIEWELQKENSKRWNPEIQYTSNYNKSTNVDFAVDTNGVYSEPRPIGTRYLTRNL

SEQ ID NO: 936 - protein, 736 aa, Artificial Sequence
  source: /note="Description of Artificial Sequence: Synthetic polypeptide"
MAADGYLPDWLEDNLSEGIREWWDLKPGAPKPKANQQKQDDGRGLVLPGYKYLGPFNGLDKGEPVNAADAAALEHDKAYDQQLKAGDNPYLRYNHADAEFQERLQEDTSFGGNLGRAVFQAKKRVLEPLGLVEEGAKTAPGKKRPVEQSPQEPDSSSGIGKKGQQPAKKRLNFGQTGDSESVPDPQPLGEPPAAPSGVGSNTMASGGGAPMADNNEGADGVGNASGNWHCDSTWLGDRVITTSTRTWALPTYNNHLYKQISSQSGGSTNDNTYFGYSTPWGYFDFNRFHCHFSPRDWQRLINNNWGFRPKKLNFKLFNIQVKEVTTNDGTTTIANNLTSTVQVFTDSEYQLPYVLGSAHQGCLPPFPADVFMIPQYGYLTLNNGSQAVGRSSFYCLEYFPSQMLRTGNNFEFSYTFEDVPFHSSYAHSQSLDRLMNPLIDQYLYYLSRTQTTSGTAGNRTLQFSQAGPSSMANQAKNWLPGPCYRQQRVSKTANQNNNSNFAWTGATKYHLNGRDSLVNPGPAMATHKDDEDKFFPMSGVLIFGKQGAGNSNVDLDNVMITSEEEIKTTNPVATEEYGTVATNLQSSNTAPATGTVNSQGALPGMVWQNRDVYLQGPIWAKIPHTDGHFHPSPLMGGFGLKHPPPQILIKNTPVPANPPTTFSPAKFASFITQYSTGQVSVEIEWELQKENSKRWNPEIQYTSNYNKSTNVDFAVDTNGVYSEPRPIGTRYLTRNL

SEQ ID NO: 937 - protein, 736 aa, Artificial Sequence
  source: /note="Description of Artificial Sequence: Synthetic polypeptide"
MAADGYLPDWLEDNLSEGIREWWDLKPGAPKPKANQQKQDDGRGLVLPGYKYLGPFNGLDKGEPVNAADAAALEHDKAYDQQLKAGDNPYLRYNHADAEFQERLQEDTSFGGNLGRAVFQAKKRVLEPLGLVEEGAKTAPGKKRPVEQSPQEPDSSSGIGKKGQQPAKKRLNFGQTGDSESVPDPQPLGEPPAAPSGVGSNTMASGGGAPMADNNEGADGVGNASGNWHCDSTWLGDRVITTSTRTWALPTYNNHLYKQISSQSGGSTNDNTYFGYSTPWGYFDFNRFHCHFSPRDWQRLINNNWGFRPKKLNFKLFNIQVKEVTTNDGTTTIANNLTSTVQVFTDSEYQLPYVLGSAHQGCLPPFPADVFMIPQYGYLTLNNGSQAVGRSSFYCLEYFPSQMLRTGNNFQFSYTFEDVPFHSSYAHSQSLDRLMNPLIDQYLYYLSRTQTTSGTAGNRELQFSQAGPSSMANQAKNWLPGPCYRQQRVSKTTNQNNNSNFAWTGATKYHLNGRDSLVNPGPAMATHKDDEDKFFPMSGVLIFGKQGAGNSNVDLDNVMITNEEEIKTTNPVATEQYGTVATNLQSANTAPATGTVNSQGALPGMVWQDRDVYLQGPIWAKIPHTDGHFHPSPLMGGFGLKHPPPQILIKNTPVPANPPTTFSPAKFASFITQYSTGQVSVEIEWELQKENSKRWNPEIQYTSNYNKSTNVDFAVDTNGVYSEPRPIGTRYLTRNL

SEQ ID NO: 938 - DNA, 2211 bp, Artificial Sequence
  source: /note="Description of Artificial Sequence: Synthetic polynucleotide"
atggctgccgatggttatcttccagattggctcgaggacaacctctctgagggcattcgcgagtggtgggacttgaaacctggagccccgaaacccaaagccaaccagcaaaagcaggacgacggccggggtctggtgcttcctggctacaagtacctcggacccttcaacggactcgacaagggggagcccgtcaacgcggcggacgcagcggccctcgagcacgacaaggcctacgaccagcagctcaaagcgggtgacaatccgtacctgcggtataaccacgccgacgccgagtttcaggagcgtctgcaagaagatacgtcttttgggggcaacctcgggcgagcagtcttccaggccaagaagcgggttctcgaacctctcggtctggttgaggaaggcgctaagacggctcctggaaagaagagaccggtagagcaatcaccccaggaaccagactcctcttcgggcatcggcaagaaaggccagcagcccgcgaaaaagagactcaactttgggcagacaggcgactcagagtcagtgcccgaccctcaaccactcggagaaccccccgcagccccctctggtgtgggatctaatacaatggctgcaggcggtggcgctccaatggcagacaataacgaaggcgccgacggagtgggtaacgcctcaggaaattggcattgcgattccacatggctgggcgacagagtcatcaccaccagcacccgaacctgggccctccccacctacaacaaccacctctacaagcaaatctccagccaatcgggagcaagcaccaacgacaacacctacttcggctacagcaccccctgggggtattttgactttaacagattccactgccacttctcaccacgtgactggcagcgactcatcaacaacaactggggattccggcccaagagactcaacttcaagctcttcaacatccaggtcaaggaggtcacgacgaatgatggcaccacgaccatcgccaataaccttaccagcacggttcaggtctttacggactcggaataccagctcccgtacgtcctcggctctgcgcaccagggctgcctgcctccgttcccggcggacgtcttcatgattcctcagtacgggtacctgactctgaacaatggcagtcaggccgtgggccgttcctccttctactgcctggagtactttccttctcaaatgctgagaacgggcaacaactttgagttcagctacacgtttgaggacgtgccttttcacagcagctacgcgcacagccaaagcctggaccggctgatgaaccccctcatcgaccagtacctgtactacctgtctcggactcagaccacgagtggtaccgcaggaaatcggacgttgcaattttctcaggccgggcctagtagcatggcgaatcaggccaaaaactggctacccgggccctgctaccggcagcaacgcgtctccaagacagcgaatcaaaataacaacagcaactttgcctggaccggtgccaccaagtatcatctgaatggcagagactctctggtaaatcccggtcccgctatggcaacccacaaggacgacgaagacaaattttttccgatgagcggagtcttaatatttgggaaacagggagctggaaatagcaacgtggaccttgacaacgttatgataaccagtgaggaagaaattaaaaccaccaacccagtggccacagaacagtacggcacggtggccactaacctgcaatcgtcaaacaccgctcctgctacagggaccgtcaacagtcaaggagccttacctggcatggtctggcagaaccgggacgtgtacctgcagggtcctatctgggccaagattcctcacacggacggacactttcatccctcgccgctgatgggaggctttggactgaaacacccgcctcctcagatcctgattaagaatacacctgttcccgcgaatcctccaactaccttcagtccagctaagtttgcgtcgttcatcacgcagtacagcaccggacaggtcagcgtggaaattgaatgggagctgcagaaagaaaacagcaaacgctggaacccagagattcaatacacttccaactacaacaaatctacaaatgtggactttgctgttgacacaaatggcgtttattctgagcctcgccccatcggcacccgttacctcacccgtaatctgtaa

SEQ ID NO: 939 - protein, 738 aa, Artificial Sequence; identical to SEQ ID NO: 18
  source: /note="Description of Artificial Sequence: Synthetic polypeptide"

SEQ ID NO: 940 - DNA, 2211 bp, Artificial Sequence
  source: /note="Description of Artificial Sequence: Synthetic polynucleotide"
atggctgccgatggttatcttccagattggctcgaggacaacctctctgagggcattcgcgagtggtgggacttgaaacctggagccccgaaacccaaagccaaccagcaaaagcaggacgacggccggggtctggtgcttcctggctacaagtacctcggacccttcaacggactcgacaagggggagcccgtcaacgcggcggacgcagcggccctcgagcacgacaaggcctacgaccagcagctcaaagcgggtgacaatccgtacctgcggtataaccacgccgacgccgagtttcaggagcgtctgcaagaagatacgtcttttgggggcaacctcgggcgagcagtcttccaggccaagaagcgggttctcgaaccttttggtctggttgaggaaggcgctaagacggctcctggaaagaaacgtccggtagagcagtcgccacaagagccagactcctcctcgggcatcggcaagacaggccagcagcccgctaaaaagagactcaattttggtcagactggcgactcagagtcagtccccgacccacaacctctcggagaacctccagcaacccccgctgctgtgggacctactacaatggcttcaggcggtggcgcaccaatggcagacaataacgaaggcgccgacggagtgggtaatgcctcaggaaattggcattgcgattccacatggctgggcgacagagtcatcaccaccagcacccgcacctgggccttgcccacctacaataaccacctctacaagcaaatctccagtgcttcaacgggggccagcaacgacaaccactacttcggctacagcaccccctgggggtattttgatttcaacagattccactgccacttttcaccgcgtgactggcagcgactcatcaacaacaattggggattccggcccaagagactcaacttcaagctcttcaacatccaagtcaaggaggtcacgacgagtgatggcgtcacaaccatcgctaataaccttaccagcacggttcaagtcttctcggactcggagtaccagcttccgtacgtcctcggctctgcgcaccagggctgcctccctccgttcccggcggacgtgttcatgattccgcaatacggctacctgacgctcaacaatggcagccaagccgtgggacgttcatccttttactgcctggaatatttcccttctcagatgctgagaacgggcaacaactttaccttcagctacacctttgaggaagtgcctttccacagcagctacgcgcacagccagagcctggaccggctgatgaatcctctcatcgaccaatacctgtattacctgaacagaactcaaaatcagtccggaagtgcccaaaacaaggacttgctgtttagccgtgggtctccagctggcatgtctgttcagcccaaaaactggctacctggaccctgttatcggcagcagcgcgtttctaaaacaaaaacaggcaacaacaacagcaattttacctggactggtgcttcaaaatataacctcaatgggcatgaatccatcatcaaccctggcactgctatggcctcacacaaagacgacgaagacaagttctttcccatgagcggtgtcatgatttttggaaaagagagcgccggagcttcaaacactgcattggacaatgtcatgattacagacgaagaggaaattaaagccactaaccctgtggccaccgaaagatttgggaccgtggcagtcaatttccagagcagcagcacacaccctgcgaccggagatgtgcatgttatgggagcattacctggcatggtgtggcaagatagagacgtgtacctgcagggtcccatctgggccaaaattcctcacacagatggacactttcacccgtctcctcttatgggcggctttggactcaagcacccgcctcctcagatcctcatcaaaaacacgcctgttcctgcgaatcctccggcggagttttcagctacaaagtttgcttcattcatcacccaatactccacaggacaagtgagtgtggaaattgaatgggagctgcagaaagaaaacagcaagcgctggaatcccgaagtgcagtacacatccaattatgcaaaatctgccaacgttgattttaccgtggacaacaatggactttatactgagcctcgccccattggcacccgttaccttacccgtcccctgtaa

SEQ ID NO: 941 - DNA, 2211 bp, Artificial Sequence; identical to SEQ ID NO: 940
  source: /note="Description of Artificial Sequence: Synthetic polynucleotide"

SEQ ID NO: 942 - DNA, 2202 bp, Artificial Sequence
  source: /note="Description of Artificial Sequence: Synthetic polynucleotide"
atgactgacggttaccttccagattggctagaggacaacctctctgaaggcgttcgagagtggtgggcgctgcaacctggagcccctaaacccaaggcaaatcaacaacatcaggacaacgctcggggtcttgtgcttccgggttacaaatacctcggacccggcaacggacttgacaagggggaacccgtcaacgcagcggacgcggcagccctcgaacacgacaaggcctacgaccagcagctcaaggccggtgacaacccctacctcaagtacaaccacgccgacgccgagtttcaggagcgtcttcaagaagatacgtcttttgggggcaacctcggacgagcagtcttccaggccaaaaagaggatccttgagcctctgggtctggttgaggaagcggctaagacggctcctggaaaaaagagacctgtagagcaatctccagcagaaccggactcctcttcgggcatcggcaaatcaggccagcagcccgctagaaaaagactgaattttggtcagactggcgacacagagtcagtcccagaccctcaaccactcggacaacctcccgcagccccctctggtgtgggatctactacaatggcttcaggcggtggcgcaccaatggcagacaataacgagggtgccgatggagtgggtaattcctcaggaaattggcattgcgattcccaatggctgggcgacagagtcatcaccaccagcacccgcacctgggccctgcccacctacaacaatcacctctacaagcaaatctccagccaatcaggagccaccaacgacaaccactactttggctacagcaccccctgggggtattttgacttcaacagattccactgccacttttcaccacgtgactggcaaagactcatcaacaacaactggggattccgacccaagagactcaacttcaagctctttaacattcaagtcaaagaggtcacgcagaatgacggtacgacgacgattgccaataaccttaccagcacggttcaggtgtttactgactccgagtaccagctcccgtacgtcctcggctcggcgcatcagggatgcctcccgccgttcccagcagacgtcttcatggtcccacagtatggatacctcaccctgaacaacgggagtcaggcggtaggacgctcttccttttactgcctggagtactttccttctcagatgctgcgtactggaaacaactttcagtttagctacacttttgaagacgtgcctttccacagcagctacgctcacagccaaagtctggaccgtctcatgaatcctctgatcgaccagtacctgtactatctgaacaggacacaaacagccagtggaactcagcagtctcggctactgtttagccaagctggacccaccagtatgtctcttcaagctaaaaactggctgcctggaccttgctacagacagcagcgtctgtcaaagcaggcaaacgacaacaacaacagcaactttccctggactggtgccaccaaatatcatctgaatggccgggactcattggtgaacccgggccctgctatggccagtcacaaggatgacaaagaaaagtttttccccatgcatggaaccctgatatttggtaaagaaggaacaaatgccaacaacgcggatttggaaaatgtcatgattacagatgaagaagaaatccgcaccaccaatcccgtggctacggagcagtacgggactgtgtcaaataatttgcaaaactcaaacgctggtccaactactggaactgtcaatcaccaaggagcgttacctggtatggtgtggcaggatcgagacgtgtacctgcagggacccatttgggccaagattcctcacaccgatggacactttcatccttctccactgatgggaggttttgggctcaaacacccgcctcctcagatcatgatcaaaaacactcccgttccagccaatcctcccacaaactttagtgcggcaaagtttgcttccttcatcacacagtactccacggggcaggtcagcgtggagatcgagtgggagctgcagaaggagaacagcaaacgctggaatcccgaaattcagtacacttccaactacaacaaatctgttaatgtggactttactgtggacactaatggtgtgtattcagagcctcgccccattggcaccagatacctgactcgtaatctgtaa

SEQ ID NO: 943 - DNA, 2211 bp, Artificial Sequence
  source: /note="Description of Artificial Sequence: Synthetic polynucleotide"
atggctgccgatggttatcttccagattggctcgaggacaacctctctgagggcattcgcgagtggtgggacttgaaacctggagccccgaaacccaaagccaaccagcaaaagcaggacgacggccggggtctggtgcttcctggctacaagtacctcggacccttcaacggactcgacaagggggagcccgtcaacgcggcggacgcagcggccctcgagcacgacaaggcctacgaccagcagctcaaagcgggtgacaatccgtacctgcggtataaccacgccgacgccgagtttcaggagcgtctgcaagaagatacgtcttttgggggcaacctcgggcgagcagtcttccaggccaagaagcgggttctcgaaccttttggtctggttgaggaaggcgctaagacggctcctggaaagaaacgtccggtagagcagtcgccacaagagccagactcctcctcgggcatcggcaagacaggccagcagcccgctaaaaagagactcaattttggtcagactggcgactcagagtcagtccccgacccacaacctctcggagaacctccagcaacccccgctgctgtgggacctactacaatggcttcaggcggtggcgcaccaatggcagacaataacgaaggcgccgacggagtgggtaatgcctcaggaaattggcattgcgattccacatggctgggcgacagagtcatcaccaccagcacccgcacctgggccttgcccacctacaataaccacctctacaagcaaatctccagtgcttcaacgggggccagcaacgacaaccactacttcggctacagcaccccctgggggtattttgatttcaacagattccactgccacttttcaccacgtgactggcagcgactcatcaacaacaattggggattccggcccaagagactcaacttcaagctcttcaacatccaagtcaaggaggtcacgacgaatgatggcgtcacaaccatcgctaataaccttaccagcacggttcaagtcttctcggactcggagtaccagcttccgtacgtcctcggctctgcgcaccagggctgcctccctccgttcccggcggacgtgttcatgattccgcaatacggctacctgacgctcaacaatggcagccaagccgtgggacgttcatccttttactgcctggaatatttcccttctcagatgctgagaacgggcaacaactttaccttcagctacacctttgaggaagtgcctttccacagcagctacgcgcacagccagagcctggaccggctgatgaatcctctcatcgaccaatacctgtattacctgaacagaactcaaaatcagtccggaagtgcccaaaacaaggacttgctgtttagccgtgggtctccagctggcatgtctgttcagcccaaaaactggctacctggaccctgttatcggcagcagcgcgtttctaaaacaaaaacagacaacaacaacagcaattttacctggactggtgcttcaaaatataacctcaatgggcgtgaatccatcatcaaccctggcactgctatggcctcacacaaagacgacgaagacaagttctttcccatgagcggtgtcatgatttttggaaaagagagcgccggagcttcaaacactgcattggacaatgtcatgattacagacgaagaggaaattaaagccactaaccctgtggccaccgaaagatttgggaccgtggcagtcaatttccagagcagcagcacagaccctgcgaccggagatgtgcatgttatgggagcattacctggcatggtgtggcaagatagagacgtgtacctgcagggtcccatctgggccaaaattcctcacacagatggacactttcacccgtctcctcttatgggcggctttggactcaagcacccgcctcctcagatcctcatcaaaaacacgcctgttcctgcgaatcctccggcggagttttcagctacaaagtttgcttcattcatcacccaatactccacaggacaagtgagtgtggaaattgaatgggagctgcagaaagaaaacagcaagcgctggaatcccgaagtgcagtacacatccaattatgcaaaatctgccaacgttgattttaccgtggacaacaatggactttatactgagcctcgccccattggcacccgttaccttacccgtcccctgtaa

SEQ ID NO: 944 - DNA, 2211 bp, Artificial Sequence
  source: /note="Description of Artificial Sequence: Synthetic polynucleotide"
atggctgccgatggttatcttccagattggctcgaggacaacctctctgagggcattcgcaagtggtgggacttgaaacctggagccccgaaacccaaagccaaccagcaaaagcaggacgacggccggggtctggtgcttcctggctacaagtacctcggacccttcaacggactcgacaagggggagcccgtcaacgcggcggacgcagcggccctcgagcacgacaaggcctacgaccagcagctcaaagcgggtgacaatccgtacctgcggtataaccacgccgacgccgagtttcaggagcgtctgcaagaagatacgtcttttgggggcaacctcgggagagcagtcttccaggccaagaagcgggttctcgaaccttttggtctggttgaggaaggcgctaagacggctcctggaaagaaacgtccggtagagcagtcgccacaagagccagactcctcctcgggcatcggcaagacaggccagcagcccgctaaaaagagactcaattttggtcagactggcgactcagagtcagtccccgacccacaacctctcggagaacctccagcaacccccgctgctgtgggacctactacaatggcttcaggcggtggcgcaccaatggcagacaataacgaaggcgccgacggagtgggtaatgcctcaggaaattggcattgcgattccacatggctgggcgacagagtcatcaccaccagcacccgcacctgggccttgcccacctacaataaccacctctacaagcaaatctccagtgcttcaacgggggccagcaacgacaaccactacttcggctacagcaccccctgggggtattttgatttcaacagattccactgccacttttcaccacgtgactggcagcgactcatcaacaacaattggggattccggcccaagagactcaacttcaagctcttcaacatccaagtcaaggaggtcacgacgaatgatggcgtcacaaccatcgctaataaccttaccagcacggttcaagtcttctcggactcggagtaccagcttccgtacgtcctcggctctgcgcaccagggctgcctccctccgttcccggcggacgtgttcatgattccgcaatacggctacctgacgctcaacaatggcagccaagccgtgggacgttcatccttttactgcctggaatatttcccttctcagatgctgagaacgggcaacaactttaccttcagctacacctttgaggaagtgcctttccacagcagctacgcgcacagccagagcctggaccggctgatgaatcctctcatcgaccaatacctgtattacctgaacagaactcaaaatcagtccggaagtgcccaaaacaaggacttgctgtttagccgtgggtctccagctggcatgtctgttcagcccaaaaactggctacctggaccctgttatcggcagcagcgcgtttctaaaacaaaaacagacaacaacaacagcaattttacctggactggtgcttcaaaatataacctcaatgggcgtgaatccatcatcaaccctggcactgctatggcctcacacaaagacgacaaagacaagttctttcccatgagcggtgtcatgatttttggaaaagagagcgccggagcttcaaacactgcattggacaatgtcatgattacagacgaagaggaaattaaagccactaaccctgtggccaccgaaagatttgggaccgtggcagtcaatttccagagcagcagcacagaccctgcgaccggagatgtgcatgttatgggagcattacctggcatggtgtggcaagatagagacgtgtacctgcagggtcccatttgggccaaaattcctcacacagatggacactttcacccgtctcctcttatgggcggctttggactcaagcacccgcctcctcagatcctcatcaaaaacacacctgttcctgcgaatcctccggcggagttttcagctacaaagtttgcttcattcatcacccaatactccacaggacaagtgagtgtggaaattgaatgggagctgcagaaagaaaacagcaagcgctggaatcccgaagtgcagtacacatccaattatgcaaaatctgccaacgttgattttaccgtggacaacaatggactttatactgagcctcgccccattggcacccgttaccttacccgtcccctgtaa

SEQ ID NO: 945 - DNA, 2211 bp, Artificial Sequence
  source: /note="Description of Artificial Sequence: Synthetic polynucleotide"
atggctgccgatggttatcttccagattggctcgaggacaacctctctgagggcattcgcgagtggtgggacttgaaacctggagccccgaaacccaaagccaaccagcaaaagcaggacaacggccggggtctggtgcttcctggctacaagtacctcggacccttcaacggactcgacaagggggagcccgtcaacgcggcggacgcagcggccctcgagcacgacaaggcctacgaccagcagctcaaagcgggtgacaatccgtacctgcggtataaccacgccgacgccgagtttcaggagcgtctgcaagaagatacgtcttttgggggcaacctcgggcgagcagtcttccaggccaagaagcgggttctcgaaccttttggtctggttgaggaaggcgctaagacggctcctggaaagaaacgtccggtagagcagtcgccacaagagccagactcctcctcgggcatcggcaagacaggccagcagcccgctaaaaagagactcaattttggtcagactggcgactcagagtcagtccccgacccacaacctctcggagaacctccagcaacccccgctgctgtgggacctactacaatggcttcaggcggtggcgcaccaatggcagacaataacgaaggcgccgacggagtgggtaatgcctcaggaaattggcattgcgattccacatggctgggcgacagagtcatcaccaccagcacccgcacctgggccttgcccacctacaataaccacctctacaagcaaatctccagtgcttcaacgggggccagcaacgacaaccactacttcggctacagcaccccctgggggtattttgatttcaacagattccactgccacttttcaccacgtgactggcagcgactcatcaacaacaattggggattccggcccaagagactcaacttcaagctcttcaacatccaagtcaaggaggtcacgacgaatgatggcgtcacaaccatcgctaataaccttaccagcacggttcaagtcttctcggactcggagtaccagcttccgtacgtcctcggctctgcgcaccagggctgcctccctccgttcccggcggacgtgttcatgattccgcaatacggctacctgacgctcaacaatggcagccaagccgtgggacgttcatccttttactgcctggaatatttcccttctcagatgctgagaacgggcaacaactttaccttcagctacacctttgaggaagtgcctttccacagcagctacgcgcacagccagagcctggaccggctgatgaatcctctcatcgaccaatacctgtattacctgaacagaactcaaaatcagtccggaagtgcccaaaacaaggacttgctgtttagccgtgggtctccagctggcatgtctgttcagcccaaaaactggctacctggaccctgttatcggcagcagcgcgtttctaaaacaaaaacagacaacaacaacagcaattttacctggactggtgcttcaaaatataacctcaatgggcgtgaatccatcatcaaccctggcactgctatggcctcacacaaagacgacgaagacaagttctttcccatgagcggtgtcatgatttttggaaaagagagcgccggagcttcaaacactgcattggacaatgtcatgattacagacgaagaggaaattaaagccactaaccctgtggccaccgaaagatttgggaccgtggcagtcaatttccagagcagcagcacacaccctgcgaccggagatgtgcatgttatgggagcattacctggcatggtgtggcaagatagagacgtgtacctgcagggtcccatctgggccaaaattcctcacacagatggacactttcacccgtctcctcttatgggcggctttggactcaagcacccgcctcctcagatcctcatcaaaaacacgcctgttcctgcgaatcctccggcggagttttcagctacaaagtttgcttcattcatcacccaatactccacaggacaagtgagtgtggaaattgaatgggagctgcagaaagaaaacagcaagcgctggaatcccgaagtgcagtacacatccaattatgcaaaatctgccaacgttgattttaccgtggacaacaatggactttatactgagcctcgccccattggcacccgttaccttacccgtcccctgtaa

SEQ ID NO: 946 - DNA, 2211 bp, Artificial Sequence
  source: /note="Description of Artificial Sequence: Synthetic polynucleotide"
atggctgccgatggttatcttccagattggctcgaggacaacctctctgagggcattcgcgagtggtgggacttgaaacctggagccccgaaacccaaagccaaccagcaaaagcaggacgacggccggggtctggtgcttcctggctacaagtacctcggacccttcaacggactcgacaagggggagcccgtcaacgcggcggacgcagcggccctcgagcacgacaaggcctacgaccagcagctcaaagcgggtgacaatccgtacctgcggtataaccacgccgacgccgagtttcaggagcgtctgcaagaagatacgtcttttgggggcaacctcgggcgagcagtcttccaggccaaaaagcgggttctcgaaccttttggtctggttgaggaaggcgctaagacggctcctggaaagaaacgtccggtagagcagtcgccacaagagccagactcctcctcgggcatcggcaagacaggccagcagcccgctaaaaagagactcaattttggtcagactggcgactcagagtcagtccccgacccacaacctctcggagaacctccagcaacccccgctgctgtgggacctactacaatggcttcaggcggtggcgcaccaatggcagacaataacgaaggcgccgacggagtgggtaatgcctcaggaaattggcattgcgattccacatggctgggcgacagagtcatcaccaccagcacccgcacctgggccttgcccacctacaataaccacctctacaagcaaatctccagtgcttcaacgggggccagcaacgacaaccactacttcggctacagcaccccctgggggtattttgatttcaacagattccactgccacttttcaccacgtgactggcagcgactcatcaacaacaattggggattccggcccaagagactcaacttcaagctcttcaacatccaagtcaaggaggtcacgacgaatgatggcgtcacaaccatcgctaataaccttaccagcacggttcaagtcttctcggactcggagtaccagcttccgtacgtcctcggctctgcgcaccagggctgcctccctccgttcccggcggacgtgttcatgattccgcaatacggctacctgacgctcaacaatggcagccaagccgtgggacgttcatccttttattgcctggaatatttcccatcgcagatgctgagaacgggcaataactttaccttcagctacacctttgaggacgtgcctttccacagcagctacgcgcacagccagagcctggaccggctgatgaatcctctcatcgaccagtacctgtattacctgaacagaactcagaaccagtccggaagtgcccaaaacaaggacttgctgtttagccgggggtctccagctggcatgtctgttcagctcaaaaactggctacctggaccctgttatcggcagcagcgcgtttctaaaacaaaaacagacaacaacaacagcaattttacctggactggtgcttcaaaatataaccttaatgggcgtgaatccatcatcaaccctggcactgctatggcctcacacaaagacgacgaagacaagttctttcccatgagcggtgtcatgatttttggaaaagagagcgccggagcttcaaacactgcattggacaatgtcatgattacagacgaagaggaaattaaagccactaaccctgtggccaccgaaagatttgggaccgtggcagtcaatttccagagcagcagcacagaccctgcgaccggagatgtgcatgttatgggagcattacctggcatggtgtggcaagatagagacgtgtacctgcagggtcccatttgggccaaaattcctcacacagatggacactttcacccgtctcctcttatgggcggctttggactcaaacacccgcctcctcagatcctcatcaaaaacacacctgttcctgcgaatcctccggcggagttttcagctacaaagtttgcttcattcatcacccaatactccacaggacaagtgagcgtggaaattgaatgggagctgcagaaagaaaacagcaagcgctggaatcccgaagtgcagtacacatccaattatgcaaaatctgccaacgttgattttaccgtggacaacaatggactttatactgagcctcgccccattggcacccgttaccttacccgtcccctgtaa

SEQ ID NO: 947 - DNA, 2211 bp, Artificial Sequence
  source: /note="Description of Artificial Sequence: Synthetic polynucleotide"
atggctgccgatggttatcttccagattggctcgaggacaacctctctgagggcattcgcgagtggtgggacttgaaacctggagccccgaaacccaaagccaaccagcaaaagcaggacgacggccggggtctggtgcttcctggctacaagtacctcggacccttcaacggactcgacaagggggagcccgtcaacgcggcggacgcagcggccctcgagcacgacaaggcctacgaccagcagctcaaagcgggtgacaatccgtacctgcggtataaccacgccgacgccgagtttcaggagcgtctgcaagaagatacgtcttttgggggcaacctcgggcgagcagtcttccaggccaagaagcgggttctcgaaccttttggtctggttgaggaaggtgctaagacggctcctggaaagaagagaccggtagagcagtcgccccaagaaccagactcctcatcgggcatcggcaaatcaggccagcagcccgctaaaaagagactcaattttggtcagactggcgactcagagtcagtccccgacccacaacctctcggagaacctccagcaacccccgctgctgtgggacctactacaatggcttcaggcggtggcgcaccaatggcagacaataacgaaggcgccgacggagtgggtaatgcctcaggaaattggcattgcgattccacatggctgggcgacagagtcattaccaccagcacccgaacctgggccctgcccacctataacaaccacctctacaaacaaatctccagcgcttcaacgggggccagcaacgacaaccactacttcggctacagcaccccctgggggtattttgattttaacagattccactgccacttctcaccacgtgactggcagcgactcatcaacaacaattggggattccggcccaagagactcaacttcaagctcttcaacatccaagtcaaggaggtcacgacgaacgatggcgtcacgaccatcgctaataaccttaccagcacggttcaagtcttctcggactcggagtaccagttgccgtacgtcctcggctctgcgcaccagggctgcctccctccgttcccggcggacgtgttcatgattccgcagtacggctacctaacactcaacaatggcagccaggccgtgggacgttcatccttttactgcctggaatatttcccatcgcagatgctgagaacgggcaataactttaccttcagctacacattcgaggacgtgcctttccacagcagctacgcgcacagccaaagcctggaccggctgatgaatcctctcatcgaccagtacttgtattacctaaacagaactcaaaatcagtccggaagtgcccaaaacaaggacttgctgtttagccgggggtctccagctggcatgtctgttcagcccaaaaactggctacctggaccctgttatcggcagcagcgcgtttctaaaacaaaaacagacaacaacaacagcaactttacctggactggtgcttcaaaatataaccttaatgggcgtgaatctataatcaaccctggcactgctatggcttcacacaaagacgacgaagacaagttctttccaatgagcggtgtcatgatttttggcaaggagagcgccggagcttcaaacactgcattggacaatgtcatgattacagacgaagaggaaattaaagccactaaccctgtggccaccgaaagatttgggaccgtggcagtcaatttccagagcagcagcacagaccctgcgaccggagatgtgcatgttatgggagcattacctggcatggtgtggcaagatagagacgtgtacctgcagggtccaatttgggccaaaattcctcacacagatggacactttcacccgtctcctcttatgggcggctttggacttaagcacccgcctcctcagatcctcatcaaaaacacgcctgttcctgcgaatcctccggcagagttttcggctacaaagtttgcttcattcatcacccagtattccacaggacaagtgagtgtggaaattgaatgggagttgcagaaagaaaacagcaagcgttggaatcccgaagtgcagtacacatctaattatgcaaaatctgccaacgttgatttcactgtggacaacaatggactttatactgagcctcgccccattggcacccgttacctcacccgtcccctgtaa

SEQ ID NO: 948 - DNA, 2211 bp, Artificial Sequence
  source: /note="Description of Artificial Sequence: Synthetic polynucleotide"
atggctgccgatggttatcttccagattggctcgaggacaacctctctgagggcattcgcgagtggtgggacttgaaacctggagccccgaaacccaaagccaaccagcaaaagcaggacgacggccggggtctggtgcttcctggctacaagtacctcggacccttcaacggactcgacaagggggagcccgtcaacgcggcggacgcagcggccctcgagcacgacaaggcctacgaccagcagctcaaagcgggtgacaatccgtacctgcggtataaccacgccgacgccgagtttcaggagcgtctgcaagaagatacgtcttttgggggcaacctcgggcgagcagtcttccaggccaagaagagggttctcgaaccttttggtctggttgaggaaggtgctaagacggctcctggaaagaaacgtccggtagagcagtcaccccaagaaccagactcctcctcgggcattggcaaatcaggccagcagcccgctaaaaagagactcaattttggtcagactggcgactcagagtcagtccccgacccacaacctctcggagaacctccagcaacccccgctgctttgggacctactacaatggcttcaggcggtggcgcaccaatggcagacaataacgaaggcgccgacggagtgggtaatgcctcaggaaattggcattgcgattccacatggctgggcgacagagtcatcaccaccagcacccgcacctgggccttgcccacctacaataaccacctctacaagcaaatctccagtgcttcaacgggggccagcaacgacaaccactacttcggctacagcaccccctgggggtattttgatttcaacagattccactgccatttctcaccacgtgactggcagcgactcatcaacaacaactggggattccggcccaagagactcaacttcaagctcttcaacatccaagtcaaggaggtcacgacgaacgatggcgtcacgaccatcgctaataaccttaccagcacggttcaagtcttctcggactcggagtaccagcttccgtacgtcctcggctctgcgcaccagggctgcctccctccgttcccggcggacgtgttcatgattccgcagtacggctacctgacgctcaacaatggcagcaaagccgtgggacgttcatccttttactgcctggaatatttcccttctcagatgctgagaacgggcaacaactttaccttcagctacacctttgaggaagtgcctttccacagcagctacgcgcacagccagagcctggaccggctgatgaatcctctcatcgaccaatacctgtattacctgaacagaactcaaaatcagtccggaagtgcccaaaacaaggacttgctgtttagccgtgggtctccagctggcatgtctgttcagcccaaaaactggctacctggaccctgttatcggcagcagcgcgtttctaaaacaaaaacagacaacaacaacagcaattttacctggactggtgcttcaaaatataacctcaatgggcgtgaatccatcatcaaccctggcactgctatggcctcacacaaagacgacgaagacaagttctttcccatgagcggtgtcatgatttttggaaaagagagcgccggagcttcaaacactgcattggacaatgtcatgattacagacgaagaggaaattaaagccactaaccctgtggccaccgaaagatttgggaccgtggcagtcaatttccagagcagcagcacagaccctgcgaccggagatgtgcatgttatgggagcattacctggcatggtgtggcaagatagagacgtgtacctgcagggtcccatttgggccaaaattcctcacacggatggacactttcacccgtctcctcttatgggcggctttggactcaagcacccgcctcctcagatcctcatcaaaaacacacctgttcctgcgaatcctccggcagagttttcggctacaaagtttgcttcattcatcacccagtactccacaggacaagtgagcgtggaaattgaatgggagttgcagaaagaaaacagtaagcgctggaatcccgaagtgcagtacacatctaattatgcaaaatctgccaacgttgacttcactgtggacaacaatggactttatactgagcctcgccccattggcacccgttacctcacccgtcccctgtaa

SEQ ID NO: 949 - DNA, 2970 bp, Artificial Sequence
  source: /note="Description of Artificial Sequence: Synthetic polynucleotide"
agatgaccgccaaggtcgtagagtccgccaaggccattctgggcggcagcaaggtgcgcgtggaccaaaaatgcaaggcctctgcgcagatcgaccccacccccgtgatcgtcacctccaacaccaacatgtgcgccgtgattgacgggaacagcaccaccttcgagcaccagcagcccctgcaggaccggatgttcaagtttgaactcacccgccgcctcgactacgactttggcaaggtcaccaagcaggaagtcaaggactttttccggtgggcggctgatcacgtgactgacgtggctcatgagttttacgtcacaaagggtggagctaagaaaaggcccgccccctctgacgaggatataagcgagcccaagcggccgcgcgtgtcatttgcgcagccggagacgtcagacgcggaagctcccggagacttcgccgacaggtaccaaaacaaatgttctcgtcacgcgggtatgctgcagatgctctttccctgcaagacgtgcgagagaatgaatcagaattccaacgtctgcttcacgcacggtcagaaagattgcggggagtgctttcccgggtcagaatctcaaccggtttctgtcgtcagaaaaacgtatcagaaactgtgcatccttcatcagctccggggggcacccgagatcgcctgctctgcttgcgaccaactcaaccccgatttggacgattgccaatttgagcaataaatgactgaaatcaggtatggctgctgacggttatcttccagattggctcgaggacaacctctctgaaggcattcgcgagtggtgggcgctgaaacctggagctccacaacccaaggccaaccaacagcatcaggacaacggcaggggtcttgtgcttcctgggtacaagtacctcggacccttcaacggactcgacaagggagagccggtcaacgaggcagacgccgcggccctcgagcacgacaaggcctacgacaagcagctcgagcagggggacaacccgtatctcaagtacaaccacggcgacgccgagttccagcagcgcttggcgaccgacacctcttttgggggcaacctcgggcgagcagtcttccaggccaaaaagaggattctcgagcctctgggtctggttgaagagggcgttaaaacggctcctggaaagaaacgcccattagaaaagactccaaatcggccgaccaacccggactctgggaaggccccggccaagaaaaagcaaaaagacggcgaaccagccgactctgctagaaggacactcgactttgaagactctggagcaggagacggaccccctgagggatcatcttccggagaaatgtctcatgatgctgagatgcgtgcggcgccaggcggaaatgctgtcgaggcgggacaaggtgccgatggagtgggtaatgcctccggtgattggcattgcgattccacctggtcagagggccgagtcaccaccaccagcacccgaacctgggtcctacccacgtacaacaaccacctgtacctgcgaatcggaacaacggccaacagcaacacctacaacggattctccaccccctggggatactttgactttaaccgcttccactgccacttttccccacgcgactggcagcgactcatcaacaacaactggggactcaggccgaaatcgatgcgtgttaaaatcttcaacatacaggtcaaggaggtcacgacgtcaaacggcgagactacggtcgctaataaccttaccagcacggttcagatctttgcggattcgacgtatgaactcccatacgtgatggacgccggtcaggaggggagctttcctccgtttcccaacgacgtctttatggttccccaatacggatactgcggagttgtcactggaaaaaaccagaaccagacagacagaaatgccttttactgcctggaatactttccatcccaaatgctaagaactggcaacaattttgaagtcagttaccaatttgaaaaagttcctttccattcaatgtacgcgcacagccagagcctggacagaatgatgaatcctttactggatcagtacctgtggcatctgcaatcgaccactaccggaaattcccttaatcaaggaacagctaccaccacgtacgggaaaattaccactggagactttgcctactacaggaaaaactggttgcctggagcctgcattaaacaacaaaaattttcaaagaatgccaatcaaaactacaagattcccgccagcgggggagacgcccttttaaagtatgacacgcataccactctaaatgggcgatggagtaacatggctcctggacctccaatggcaaccgcaggtgccggggactcggattttagcaacagccagctgatctttgccggacccaatccgagcggtaacacgaccacatcttcaaacaatttgttgtttacctcagaagaggagattgccacaacaaacccacgagacacggacatgtttggacagattgcagataataatcaaaatgccaccaccgcccctcacatcgctaacctggacgctatgggaattgttcccggaatggtctggcaaaacagagacatctactaccagggccctatttgggccaaggtccctcacacggacggacactttcacccttcgccgctgatgggaggatttggactgaaacacccgcctccacagattttcatcaaaaacacccccgtacccgccaatcccaatactacctttagcgctgcaaggattaattcttttctgacgcagtacagcaccggacaagttgccgttcagatcgactgggaaattcagaaggagcattccaaacgctggaatcccgaagttcaatttacttcaaactacggcactcaaaattctatgctgtgggctcccgacaatgctggcaactaccacgaactccgggctattgggtcccgtttcctcacccaccacttgtaa

SEQ ID NO: 950 - protein, 736 aa, Artificial Sequence
  source: /note="Description of Artificial Sequence: Synthetic polypeptide"
MAADGYLPDWLEDNLSEGIREWWDLKPGAPKPKANQQKQDDGRGLVLPGYKYLGPFNGLDKGEPVNAADAAALEHDKAYDQQLKAGDNPYLRYNHADAEFQERLQEDTSFGGNLGRAVFQAKKRVLEPFGLVEEGAKTAPGKKRPVEQSPQEPDSSSGIGKTGQQPAKKRLNFGQTGDSESVPDPQPLGEPPATPAAVGPTTMASGGGAPMADNNEGADGVGNASGNWHCDSTWLGDRVITTSTRTWALPTYNNHLYKQISSASTGASNDNHYFGYSTPWGYFDFNRFHCHFSPRDWQRLINNNWGFRPKRLNFKLFNIQVKEVTTSDGVTTIANNLTSTVQVFSDSEYQLPYVLGSAHQGCLPPFPADVFMIPQYGYLTLNNGSQAVGRSSFYCLEYFPSQMLRTGNNFTFSYTFEEVPFHSSYAHSQSLDRLMNPLIDQYLYYLNRTQNQSGSAQNKDLLFSRGSPAGMSVQPKNWLPGPCYRQQRVSKTKTGNNNSNFTWTGASKYNLNGHESIINPGTAMASHKDDEDKFFPMSGVMIFGKESAGASNTALDNVMITDEEEIKATNPVATERFGTVAVNFQSSSTHPATGDVHVMGALPGMVWQDRDVYLQGPIWAKIPHTDGHFHPSPLMGGFGLKHPPPQILIKNTPVPANPPAEFSATKFASFITQYSTGQVSVEIEWELQKENSKRWNPEVQYTSNYAKSANVDFTVDNNGLYTEPRPIGTRYLTRPL

SEQ ID NO: 951 - protein, 736 aa, Artificial Sequence; identical to SEQ ID NO: 950
  source: /note="Description of Artificial Sequence: Synthetic polypeptide"

SEQ ID NO: 952 - protein, 733 aa, Artificial Sequence
  source: /note="Description of Artificial Sequence: Synthetic polypeptide"
MTDGYLPDWLEDNLSEGVREWWALQPGAPKPKANQQHQDNARGLVLPGYKYLGPGNGLDKGEPVNAADAAALEHDKAYDQQLKAGDNPYLKYNHADAEFQERLQEDTSFGGNLGRAVFQAKKRILEPLGLVEEAAKTAPGKKRPVEQSPAEPDSSSGIGKSGQQPARKRLNFGQTGDTESVPDPQPLGQPPAAPSGVGSTTMASGGGAPMADNNEGADGVGNSSGNWHCDSQWLGDRVITTSTRTWALPTYNNHLYKQISSQSGATNDNHYFGYSTPWGYFDFNRFHCHFSPRDWQRLINNNWGFRPKRLNFKLFNIQVKEVTQNDGTTTIANNLTSTVQVFTDSEYQLPYVLGSAHQGCLPPFPADVFMVPQYGYLTLNNGSQAVGRSSFYCLEYFPSQMLRTGNNFQFSYTFEDVPFHSSYAHSQSLDRLMNPLIDQYLYYLNRTQTASGTQQSRLLFSQAGPTSMSLQAKNWLPGPCYRQQRLSKQANDNNNSNFPWTGATKYHLNGRDSLVNPGPAMASHKDDKEKFFPMHGTLIFGKEGTNANNADLENVMITDEEEIRTTNPVATEQYGTVSNNLQNSNAGPTTGTVNHQGALPGMVWQDRDVYLQGPIWAKIPHTDGHFHPSPLMGGFGLKHPPPQIMIKNTPVPANPPTNFSAAKFASFITQYSTGQVSVEIEWELQKENSKRWNPEIQYTSNYNKSVNVDFTVDTNGVYSEPRPIGTRYLTRNL

SEQ ID NO: 953 - protein, 736 aa, Artificial Sequence; identical to SEQ ID NO: 768
  source: /note="Description of Artificial Sequence: Synthetic polypeptide"

SEQ ID NO: 954 - protein, 736 aa, Artificial Sequence
  source: /note="Description of Artificial Sequence: Synthetic polypeptide"
MAADGYLPDWLEDNLSEGIRKWWDLKPGAPKPKANQQKQDDGRGLVLPGYKYLGPFNGLDKGEPVNAADAAALEHDKAYDQQLKAGDNPYLRYNHADAEFQERLQEDTSFGGNLGRAVFQAKKRVLEPFGLVEEGAKTAPGKKRPVEQSPQEPDSSSGIGKTGQQPAKKRLNFGQTGDSESVPDPQPLGEPPATPAAVGPTTMASGGGAPMADNNEGADGVGNASGNWHCDSTWLGDRVITTSTRTWALPTYNNHLYKQISSASTGASNDNHYFGYSTPWGYFDFNRFHCHFSPRDWQRLINNNWGFRPKRLNFKLFNIQVKEVTTNDGVTTIANNLTSTVQVFSDSEYQLPYVLGSAHQGCLPPFPADVFMIPQYGYLTLNNGSQAVGRSSFYCLEYFPSQMLRTGNNFTFSYTFEEVPFHSSYAHSQSLDRLMNPLIDQYLYYLNRTQNQSGSAQNKDLLFSRGSPAGMSVQPKNWLPGPCYRQQRVSKTKTDNNNSNFTWTGASKYNLNGRESIINPGTAMASHKDDKDKFFPMSGVMIFGKESAGASNTALDNVMITDEEEIKATNPVATERFGTVAVNFQSSSTDPATGDVHVMGALPGMVWQDRDVYLQGPIWAKIPHTDGHFHPSPLMGGFGLKHPPPQILIKNTPVPANPPAEFSATKFASFITQYSTGQVSVEIEWELQKENSKRWNPEVQYTSNYAKSANVDFTVDNNGLYTEPRPIGTRYLTRPL

SEQ ID NO: 955 - protein, 736 aa, Artificial Sequence
  source: /note="Description of Artificial Sequence: Synthetic polypeptide"
MAADGYLPDWLEDNLSEGIREWWDLKPGAPKPKANQQKQDNGRGLVLPGYKYLGPFNGLDKGEPVNAADAAALEHDKAYDQQLKAGDNPYLRYNHADAEFQERLQEDTSFGGNLGRAVFQAKKRVLEPFGLVEEGAKTAPGKKRPVEQSPQEPDSSSGIGKTGQQPAKKRLNFGQTGDSESVPDPQPLGEPPATPAAVGPTTMASGGGAPMADNNEGADGVGNASGNWHCDSTWLGDRVITTSTRTWALPTYNNHLYKQISSASTGASNDNHYFGYSTPWGYFDFNRFHCHFSPRDWQRLINNNWGFRPKRLNFKLFNIQVKEVTTNDGVTTIANNLTSTVQVFSDSEYQLPYVLGSAHQGCLPPFPADVFMIPQYGYLTLNNGSQAVGRSSFYCLEYFPSQMLRTGNNFTFSYTFEEVPFHSSYAHSQSLDRLMNPLIDQYLYYLNRTQNQSGSAQNKDLLFSRGSPAGMSVQPKNWLPGPCYRQQRVSKTKTDNNNSNFTWTGASKYNLNGRESIINPGTAMASHKDDEDKFFPMSGVMIFGKESAGASNTALDNVMITDEEEIKATNPVATERFGTVAVNFQSSSTHPATGDVHVMGALPGMVWQDRDVYLQGPIWAKIPHTDGHFHPSPLMGGFGLKHPPPQILIKNTPVPANPPAEFSATKFASFITQYSTGQVSVEIEWELQKENSKRWNPEVQYTSNYAKSANVDFTVDNNGLYTEPRPIGTRYLTRPL

SEQ ID NO: 956 - protein, 736 aa, Artificial Sequence
  source: /note="Description of Artificial Sequence: Synthetic polypeptide"
MAADGYLPDWLEDNLSEGIREWWDLKPGAPKPKANQQKQDDGRGLVLPGYKYLGPFNGLDKGEPVNAADAAALEHDKAYDQQLKAGDNPYLRYNHADAEFQERLQEDTSFGGNLGRAVFQAKKRVLEPFGLVEEGAKTAPGKKRPVEQSPQEPDSSSGIGKTGQQPAKKRLNFGQTGDSESVPDPQPLGEPPATPAAVGPTTMASGGGAPMADNNEGADGVGNASGNWHCDSTWLGDRVITTSTRTWALPTYNNHLYKQISSASTGASNDNHYFGYSTPWGYFDFNRFHCHFSPRDWQRLINNNWGFRPKRLNFKLFNIQVKEVTTNDGVTTIANNLTSTVQVFSDSEYQLPYVLGSAHQGCLPPFPADVFMIPQYGYLTLNNGSQAVGRSSFYCLEYFPSQMLRTGNNFTFSYTFEDVPFHSSYAHSQSLDRLMNPLIDQYLYYLNRTQNQSGSAQNKDLLFSRGSPAGMSVQLKNWLPGPCYRQQRVSKTKTDNNNSNFTWTGASKYNLNGRESIINPGTAMASHKDDEDKFFPMSGVMIFGKESAGASNTALDNVMITDEEEIKATNPVATERFGTVAVNFQSSSTDPATGDVHVMGALPGMVWQDRDVYLQGPIWAKIPHTDGHFHPSPLMGGFGLKHPPPQILIKNTPVPANPPAEFSATKFASFITQYSTGQVSVEIEWELQKENSKRWNPEVQYTSNYAKSANVDFTVDNNGLYTEPRPIGTRYLTRPL

SEQ ID NO: 957 - protein, 736 aa, Artificial Sequence
  source: /note="Description of Artificial Sequence: Synthetic polypeptide"
MAADGYLPDWLEDNLSEGIREWWDLKPGAPKPKANQQKQDDGRGLVLPGYKYLGPFNGLDKGEPVNAADAAALEHDKAYDQQLKAGDNPYLRYNHADAEFQERLQEDTSFGGNLGRAVFQAKKRVLEPFGLVEEGAKTAPGKKRPVEQSPQEPDSSSGIGKSGQQPAKKRLNFGQTGDSESVPDPQPLGEPPATPAAVGPTTMASGGGAPMADNNEGADGVGNASGNWHCDSTWLGDRVITTSTRTWALPTYNNHLYKQISSASTGASNDNHYFGYSTPWGYFDFNRFHCHFSPRDWQRLINNNWGFRPKRLNFKLFNIQVKEVTTNDGVTTIANNLTSTVQVFSDSEYQLPYVLGSAHQGCLPPFPADVFMIPQYGYLTLNNGSQAVGRSSFYCLEYFPSQMLRTGNNFTFSYTFEDVPFHSSYAHSQSLDRLMNPLIDQYLYYLNRTQNQSGSAQNKDLLFSRGSPAGMSVQPKNWLPGPCYRQQRVSKTKTDNNNSNFTWTGASKYNLNGRESIINPGTAMASHKDDEDKFFPMSGVMIFGKGSAGASNTALDNVMITDEEEIKATNPVATERFGTVAVNFQSSSTDPATGDVHVMGALPGMVWQDRDVYLQGPIWAKIPHTDGHFHPSPLMGGFGLKHPPPQILIKNTPVPANPPAEFSATKFASFITQYSTGQVSVEIEWELQKENSKRWNPEVQYTSNYAKSANVDFTVDNNGLYTEPRPIGTRYLTRPL

SEQ ID NO: 958 - protein, 736 aa, Artificial Sequence; identical to SEQ ID NO: 699
  source: /note="Description of Artificial Sequence: Synthetic polypeptide"

SEQ ID NO: 959 - protein, 742 aa, Artificial Sequence
  source: /note="Description of Artificial Sequence: Synthetic polypeptide"
MAADGYLPDWLEDNLSEGIREWWALKPGAPQPKANQQHQDNGRGLVLPGYKYLGPFNGLDKGEPVNEADAAALEHDKAYDKQLEQGDNPYLKYNHADAEFQQRLATDTSFGGNLGRAVFQAKKRILEPLGLVEEGVKTAPGKKRPLEKTPNRPTNPDSGKAPAKKKQKDGEPADSARRTLDFEDSGAGDGPPEGSSSGEMSHDAEMRAAPGGNAVEAGQGADGVGNASGDWHCDSTWSEGRVTTTSTRTWVLPTYNNHLYLRIGTTANSNTYNGFSTPWGYFDFNRFHCHFSPRDWQRLINNNWGLRPKSMRVKIFNIQVKEVTTSNGETTVANNLTSTVQIFADSTYELPYVMDAGQEGSFPPFPNDVFMVPQYGYCGVVTGKNQNQTDRNAFYCLEYFPSQMLRTGNNFEVSYQFEKVPFHSMYAHSQSLDRMMNPLLDQYLWHLQSTTTGNSLNQGTATTTYGKITTGDFAYYRKNWLPGACIKQQKFSKNANQNYKIPASGGDALLKYDTHTTLNGRWSNMAPGPPMATAGAGDSDFSNSQLIFAGPNPSGNTTTSSNNLLFTSEEEIATTNPRDTDMFGQIADNNQNATTAPHIANLDAMGIVPGMVWQNRDIYYQGPIWAKVPHTDGHFHPSPLMGGFGLKHPPPQIFIKNTPVPANPNTTFSAARINSFLTQYSTGQVAVQIDWEIQKEHSKRWNPEVQFTSNYGTQNSMLWAPDNAGNYHELRAIGSRFLTHHL

SEQ ID NO: 960 - DNA, 2211 bp, Artificial Sequence
  source: /note="Description of Artificial Sequence: Synthetic polynucleotide"
atggctgccgatggttatcttccagattggctcgaggacaacctctctgagggcattcgcgagtggtgggacttgaaacctggagccccgaagcccaaagccaaccagcaaaagcaggacgacggccggggtctggtgcttcctggctacaagtacctcggacccttcaacggactcgacaagggggagcccgtcaacgcggcggacgcagcggccctcgagcacgacaaggcctacgaccagcagctcaaagcgggtgacaatccgtacctgcggtataaccacgccgacgccgagtttcaggagcgtctgcaagaagatacgtcttttgggggcaacctcgggcgagcagtcttccaggccaagaagcgggttctcgaacctctcggtctggttgaggaaggcgctaaggcggctcctggaaagaaacgtccggtagagcagtcgccacaagagccagactcctcctcgggcatcggcaagacaggccagcagcccgctaaaaagagactcaattttggtcagactggcgactcagagtcagtccccgatccacaacctctcggagaacctccagcagccccctcaggtctgggacctaatacaatggcttcaggcggtggcgctccaatggcagacaataacgaaggcgccgacggagtgggtaattcctcgggaaattggcattgcgattccacatggctgggggacagagtcatcaccaccagcacccgaacctgggccctgcccacctacaacaaccacctctacaagcaaatctccaacggcacctcgggaggaagcaccaacgacaacacctattttggctacagcaccccctgggggtattttgacttcaacagattccactgtcacttttcaccacgtgactggcaacgactcatcaacaacaattggggattccggcccaaaagactcaacttcaagctgttcaacatccaggtcaaggaagtcacgacgaacgaaggcaccaagaccatcgccaataatctcaccagcaccgtgcaggtctttacggactcggagtaccagttaccgtacgtgctaggatccgctcaccagggatgtctgcctccgttcccggcggacgtcttcatggttcctcagtacggctatttaactttaaacaatggaagccaagccctgggacgttcctccttctactgtctggagtatttcccatcgcagatgctgagaaccggcaacaactttcagttcagctacaccttcgaggacgtgcctttccacagcagctacgcgcacagccagagcctggacaggctgatgaatcccctcatcgaccagtacctgtactacctggtcagaacgcaaacgactggaactggagggacgcagactctggcattcagccaagcgggtcctagctcaatggccaaccaggctagaaattgggtgcccggaccttgctaccggcagcagcgcgtctccacgacaaccaaccagaacaacaacagcaactttgcctggacgggagctgccaagtttaagctgaacggccgagactctctaatgaatccgggcgtggcaatggcttcccacaaggatgacgacgaccgcttcttcccttcgagcggggtcctgatttttggcaagcaaggagccgggaacgatggagtggattacagccaagtgctgattacagatgaggaagaaatcaaggctaccaaccccgtggccacagaagaatatggagcagtggccatcaacaaccaggccgccaatacgcaggcgcagaccggactcgtgcacaaccagggggtgattcccggcatggtgtggcagaatagagacgtgtacctgcagggtcccatctgggccaaaattcctcacacggacggcaactttcacccgtctcccctgatgggcggctttggactgaagcacccgcctcctcaaattctcatcaagaacacaccggttccagcggacccgccgcttaccttcaaccaggccaagctgaactctttcatcacgcagtacagcaccggacaggtcagcgtggaaatcgagtgggagctgcagaaagaaaacagcaaacgctggaatccagagattcaatacacttccaactactacaaatctacaaatgtggactttgctgtcaacacggagggggtttatagcgagcctcgccccattggcacccgttacctcacccgcaacctgtaa

SEQ ID NO: 961 - DNA, 2592 bp, Artificial Sequence
  source: /note="Description of Artificial Sequence: Synthetic polynucleotide"
ctggctgccgatggttatcttccagattggctcgaggacaacctctctgagggcattcgcgagtggtgggacttgaaacctggagccccgaagcccaaagccaaccagcaaaagcaggacgacggccggggtctggtgcttcctggctacaagtacctcggacccttcaacggactcgacaagggggagcccgtcaacgcggcggacgcagcggccctcgagcacgacaaggcctacgaccagcagctcaaagcgggtgacaatccgtacctgcggtataaccacgccgacgccgagtttcaggagcgtctgcaagaagatacgtcttttgggggcaacctcgggcgagcagtcttccaggccaagaagcgggttctcgaacctctcggtctggttgaggaaggcgctaagatggaagtgcagctccaagccagtggtggcggactggtgcaggcaggaggcagcttgaggctcagctgtgccgccagcggcttcaagatcacccactacaccatgggctggttccggcaggcccctggcaaggagagggagttcgtgagcaggattacctggggtggtgacaacaccttctacagcaacagcgtgaagggcaggttcaccatcagcagggacaacgccaagaacaccgtgtacctgcagatgaacagcctgaagcccgaggacaccgccgactactactgtgcagccggcagtaccagcaccgctacccccctgagggtggactactggggcaaaggcactcaggtgacagtgtcttcaggagggggtggcagcgctcctggaaagaaacgtccggtagagcagtcgccacaagagccagactcctcctcgggcatcggcaagacaggccagcagcccgctaaaaagagactcaattttggtcagactggcgactcagagtcagtccccgatccacaacctctcggagaacctccagcagccccctcaggtctgggacctaatacaatggcttcaggcggtggcgctccaatggcagacaataacgaaggcgccgacggagtgggtaattcctcgggaaattggcattgcgattccacatggctgggggacagagtcatcaccaccagcacccgaacctgggccctgcccacctacaacaaccacctctacaagcaaatctccaacggcacctcgggaggaagcaccaacgacaacacctattttggctacagcaccccctgggggtattttgacttcaacagattccactgtcacttttcaccacgtgactggcaacgactcatcaacaacaattggggattccggcccaaaagactcaacttcaagctgttcaacatccaggtcaaggaagtcacgacgaacgaaggcaccaagaccatcgccaataatctcaccagcaccgtgcaggtctttacggactcggagtaccagttaccgtacgtgctaggatccgctcaccagggatgtctgcctccgttcccggcggacgtcttcatggttcctcagtacggctatttaactttaaacaatggaagccaagccctgggacgttcctccttctactgtctggagtatttcccatcgcagatgctgagaaccggcaacaactttcagttcagctacaccttcgaggacgtgcctttccacagcagctacgcgcacagccagagcctggacaggctgatgaatcccctcatcgaccagtacctgtactacctggtcagaacgcaaacgactggaactggagggacgcagactctggcattcagccaagcgggtcctagctcaatggccaaccaggctagaaattgggtgcccggaccttgctaccggcagcagcgcgtctccacgacaaccaaccagaacaacaacagcaactttgcctggacgggagctgccaagtttaagctgaacggccgagactctctaatgaatccgggcgtggcaatggcttcccacaaggatgacgacgaccgcttcttcccttcgagcggggtcctgatttttggcaagcaaggagccgggaacgatggagtggattacagccaagtgctgattacagatgaggaagaaatcaaggctaccaaccccgtggccacagaagaatatggagcagtggccatcaacaaccaggccgccaatacgcaggcgcagaccggactcgtgcacaaccagggggtgattcccggcatggtgtggcagaatagagacgtgtacctgcagggtcccatctgggccaaaattcctcacacggacggcaactttcacccgtctcccctgatgggcggctttggactgaagcacccgcctcctcaaattctcatcaagaacacaccggttccagcggacccgccgcttaccttcaaccaggccaagctgaactctttcatcacgcagtacagcaccggacaggtcagcgtggaaatcgagtgggagctgcagaaagaaaacagcaaacgctggaatccagagattcaatacacttccaactactacaaatctacaaatgtggactttgctgtcaacacggagggggtttatagcgagcctcgccccattggcacccgttacctcacccgcaacctgtaa

SEQ ID NO: 962 - DNA, 2601 bp, Artificial Sequence
  source: /note="Description of Artificial Sequence: Synthetic polynucleotide"
ctggctgccgatggttatcttccagattggctcgaggacaacctctctgagggcattcgcgagtggtgggacttgaaacctggagccccgaagcccaaagccaaccagcaaaagcaggacgacggccggggtctggtgcttcctggctacaagtacctcggacccttcaacggactcgacaagggggagcccgtcaacgcggcggacgcagcggccctcgagcacgacaaggcctacgaccagcagctcaaagcgggtgacaatccgtacctgcggtataaccacgccgacgccgagtttcaggagcgtctgcaagaagatacgtcttttgggggcaacctcgggcgagcagtcttccaggccaagaagcgggttctcgaacctctcggtctggttgaggaaggcgctaagatggaggtgcagctgcaggcttctggaggaggactggtgcaggctggagggagtctgaggctgtcttgcagtgcctcagtgaggactttctccatctacgccatgggctggtttaggcaggctcccgggaaggagcgcgaattcgtggccggaatcaaccggtctggcgacgtgaccaagtacgctgatttcgtgaaaggccggtttagcatttccagagacaacgccaagaatatggtgtatctgcagatgaactccctgaaacctgaagacacagctctgtactattgtgccgctacttgggcctacgataccgtgggggctctgacatcaggatataatttttggggccaggggacccaggtgacagtgagctccggaggaggaggaagcgctcctggaaagaaacgtccggtagagcagtcgccacaagagccagactcctcctcgggcatcggcaagacaggccagcagcccgctaaaaagagactcaattttggtcagactggcgactcagagtcagtccccgatccacaacctctcggagaacctccagcagccccctcaggtctgggacctaatacaatggcttcaggcggtggcgctccaatggcagacaataacgaaggcgccgacggagtgggtaattcctcgggaaattggcattgcgattccacatggctgggggacagagtcatcaccaccagcacccgaacctgggccctgcccacctacaacaaccacctctacaagcaaatctccaacggcacctcgggaggaagcaccaacgacaacacctattttggctacagcaccccctgggggtattttgacttcaacagattccactgtcacttttcaccacgtgactggcaacgactcatcaacaacaattggggattccggcccaaaagactcaacttcaagctgttcaacatccaggtcaaggaagtcacgacgaacgaaggcaccaagaccatcgccaataatctcaccagcaccgtgcaggtctttacggactcggagtaccagttaccgtacgtgctaggatccgctcaccagggatgtctgcctccgttcccggcggacgtcttcatggttcctcagtacggctatttaactttaaacaatggaagccaagccctgggacgttcctccttctactgtctggagtatttcccatcgcagatgctgagaaccggcaacaactttcagttcagctacaccttcgaggacgtgcctttccacagcagctacgcgcacagccagagcctggacaggctgatgaatcccctcatcgaccagtacctgtactacctggtcagaacgcaaacgactggaactggagggacgcagactctggcattcagccaagcgggtcctagctcaatggccaaccaggctagaaattgggtgcccggaccttgctaccggcagcagcgcgtctccacgacaaccaaccagaacaacaacagcaactttgcctggacgggagctgccaagtttaagctgaacggccgagactctctaatgaatccgggcgtggcaatggcttcccacaaggatgacgacgaccgcttcttcccttcgagcggggtcctgatttttggcaagcaaggagccgggaacgatggagtggattacagccaagtgctgattacagatgaggaagaaatcaaggctaccaaccccgtggccacagaagaatatggagcagtggccatcaacaaccaggccgccaatacgcaggcgcagaccggactcgtgcacaaccagggggtgattcccggcatggtgtggcagaatagagacgtgtacctgcagggtcccatctgggccaaaattcctcacacggacggcaactttcacccgtctcccctgatgggcggctttggactgaagcacccgcctcctcaaattctcatcaagaacacaccggttccagcggacccgccgcttaccttcaaccaggccaagctgaactctttcatcacgcagtacagcaccggacaggtcagcgtggaaatcgagtgggagctgcagaaagaaaacagcaaacgctggaatccagagattcaatacacttccaactactacaaatctacaaatgtggactttgctgtcaacacggagggggtttatagcgagcctcgccccattggcacccgttacctcacccgcaacctgtaa

SEQ ID NO: 963 - DNA, 2367 bp, Artificial Sequence
  source: /note="Description of Artificial Sequence: Synthetic polynucleotide"
ctggctgccgatggttatcttccagattggctcgaggacaacctctctgagggcattcgcgagtggtgggacttgaaacctggagccccgaagcccaaagccaaccagcaaaagcaggacgacggccggggtctggtgcttcctggctacaagtacctcggacccttcaacggactcgacaagggggagcccgtcaacgcggcggacgcagcggccctcgagcacgacaaggcctacgaccagcagctcaaagcgggtgacaatccgtacctgcggtataaccacgccgacgccgagtttcaggagcgtctgcaagaagatacgtcttttgggggcaacctcgggcgagcagtcttccaggccaagaagcgggttctcgaacctctcggtctggttgaggaaggcgctaagatgccaagcagtgtaatcgatgcgctgcagtacaagctggagggcaccacgaggctgaccaggaagaggggtctgaagctggccacggccctcagccttagcaataagttcgtagagggcagccccagcggcggcggcggcagcggcggcggcggcagcgctcctggaaagaaacgtccggtagagcagtcgccacaagagccagactcctcctcgggcatcggcaagacaggccagcagcccgctaaaaagagactcaattttggtcagactggcgactcagagtcagtccccgatccacaacctctcggagaacctccagcagccccctcaggtctgggacctaatacaatggcttcaggcggtggcgctccaatggcagacaataacgaaggcgccgacggagtgggtaattcctcgggaaattggcattgcgattccacatggctgggggacagagtcatcaccaccagcacccgaacctgggccctgcccacctacaacaaccacctctacaagcaaatctccaacggcacctcgggaggaagcaccaacgacaacacctattttggctacagcaccccctgggggtattttgacttcaacagattccactgtcacttttcaccacgtgactggcaacgactcatcaacaacaattggggattccggcccaaaagactcaacttcaagctgttcaacatccaggtcaaggaagtcacgacgaacgaaggcaccaagaccatcgccaataatctcaccagcaccgtgcaggtctttacggactcggagtaccagttaccgtacgtgctaggatccgctcaccagggatgtctgcctccgttcccggcggacgtcttcatggttcctcagtacggctatttaactttaaacaatggaagccaagccctgggacgttcctccttctactgtctggagtatttcccatcgcagatgctgagaaccggcaacaactttcagttcagctacaccttcgaggacgtgcctttccacagcagctacgcgcacagccagagcctggacaggctgatgaatcccctcatcgaccagtacctgtactacctggtcagaacgcaaacgactggaactggagggacgcagactctggcattcagccaagcgggtcctagctcaatggccaaccaggctagaaattgggtgcccggaccttgctaccggcagcagcgcgtctccacgacaaccaaccagaacaacaacagcaactttgcctggacgggagctgccaagtttaagctgaacggccgagactctctaatgaatccgggcgtggcaatggcttcccacaaggatgacgacgaccgcttcttcccttcgagcggggtcctgatttttggcaagcaaggagccgggaacgatggagtggattacagccaagtgctgattacagatgaggaagaaatcaaggctaccaaccccgtggccacagaagaatatggagcagtggccatcaacaaccaggccgccaatacgcaggcgcagaccggactcgtgcacaaccagggggtgattcccggcatggtgtggcagaatagagacgtgtacctgcagggtcccatctgggccaaaattcctcacacggacggcaactttcacccgtctcccctgatgggcggctttggactgaagcacccgcctcctcaaattctcatcaagaacacaccggttccagcggacccgccgcttaccttcaaccaggccaagctgaactctttcatcacgcagtacagcaccggacaggtcagcgtggaaatcgagtgggagctgcagaaagaaaacagcaaacgctggaatccagagattcaatacacttccaactactacaaatctacaaatgtggactttgctgtcaacacggagggggtttatagcgagcctcgccccattggcacccgttacctcacccgcaacctgtaa

SEQ ID NO: 964 - DNA, 2328 bp, Artificial Sequence
  source: /note="Description of Artificial Sequence: Synthetic polynucleotide"
ctggctgccgatggttatcttccagattggctcgaggacaacctctctgagggcattcgcgagtggtgggacttgaaacctggagccccgaagcccaaagccaaccagcaaaagcaggacgacggccggggtctggtgcttcctggctacaagtacctcggacccttcaacggactcgacaagggggagcccgtcaacgcggcggacgcagcggccctcgagcacgacaaggcctacgaccagcagctcaaagcgggtgacaatccgtacctgcggtataaccacgccgacgccgagtttcaggagcgtctgcaagaagatacgtcttttgggggcaacctcgggcgagcagtcttccaggccaagaagcgggttctcgaacctctcggtctggttgaggaaggcgctaagatgtataccatctggatgcccgagaaccccaggcccggtaccccctgcgacatcttcaccaacagcaggggcaagcgagccagcaacggcggcggcggcggcagcggcggcggcggcagcgctcctggaaagaaacgtccggtagagcagtcgccacaagagccagactcctcctcgggcatcggcaagacaggccagcagcccgctaaaaagagactcaattttggtcagactggcgactcagagtcagtccccgatccacaacctctcggagaacctccagcagccccctcaggtctgggacctaatacaatggcttcaggcggtggcgctccaatggcagacaataacgaaggcgccgacggagtgggtaattcctcgggaaattggcattgcgattccacatggctgggggacagagtcatcaccaccagcacccgaacctgggccctgcccacctacaacaaccacctctacaagcaaatctccaacggcacctcgggaggaagcaccaacgacaacacctattttggctacagcaccccctgggggtattttgacttcaacagattccactgtcacttttcaccacgtgactggcaacgactcatcaacaacaattggggattccggcccaaaagactcaacttcaagctgttcaacatccaggtcaaggaagtcacgacgaacgaaggcaccaagaccatcgccaataatctcaccagcaccgtgcaggtctttacggactcggagtaccagttaccgtacgtgctaggatccgctcaccagggatgtctgcctccgttcccggcggacgtcttcatggttcctcagtacggctatttaactttaaacaatggaagccaagccctgggacgttcctccttctactgtctggagtatttcccatcgcagatgctgagaaccggcaacaactttcagttcagctacaccttcgaggacgtgcctttccacagcagctacgcgcacagccagagcctggacaggctgatgaatcccctcatcgaccagtacctgtactacctggtcagaacgcaaacgactggaactggagggacgcagactctggcattcagccaagcgggtcctagctcaatggccaaccaggctagaaattgggtgcccggaccttgctaccggcagcagcgcgtctccacgacaaccaaccagaacaacaacagcaactttgcctggacgggagctgccaagtttaagctgaacggccgagactctctaatgaatccgggcgtggcaatggcttcccacaaggatgacgacgaccgcttcttcccttcgagcggggtcctgatttttggcaagcaaggagccgggaacgatggagtggattacagccaagtgctgattacagatgaggaagaaatcaaggctaccaaccccgtggccacagaagaatatggagcagtggccatcaacaaccaggccgccaatacgcaggcgcagaccggactcgtgcacaaccagggggtgattcccggcatggtgtggcagaatagagacgtgtacctgcagggtcccatctgggccaaaattcctcacacggacggcaactttcacccgtctcccctgatgggcggctttggactgaagcacccgcctcctcaaattctcatcaagaacacaccggttccagcggacccgccgcttaccttcaaccaggccaagctgaactctttcatcacgcagtacagcaccggacaggtcagcgtggaaatcgagtgggagctgcagaaagaaaacagcaaacgctggaatccagagattcaatacacttccaactactacaaatctacaaatgtggactttgctgtcaacacggagggggtttatagcgagcctcgccccattggcacccgttacctcacccgcaacctgtaa

SEQ ID NO: 965 - DNA, 2298 bp, Artificial Sequence
  source: /note="Description of Artificial Sequence: Synthetic polynucleotide"
ctggctgccgatggttatcttccagattggctcgaggacaacctctctgagggcattcgcgagtggtgggacttgaaacctggagccccgaagcccaaagccaaccagcaaaagcaggacgacggccggggtctggtgcttcctggctacaagtacctcggacccttcaacggactcgacaagggggagcccgtcaacgcggcggacgcagcggccctcgagcacgacaaggcctacgaccagcagctcaaagcgggtgacaatccgtacctgcggtataaccacgccgacgccgagtttcaggagcgtctgcaagaagatacgtcttttgggggcaacctcgggcgagcagtcttccaggccaagaagcgggttctcgaacctctcggtctggttgaggaaggcgctaagatgaccttcttctacggcggcagcaggggcaagaggaacaacttcaagaccgaggagtacggcggcggcggcagcggcggcggcggcagcgctcctggaaagaaacgtccggtagagcagtcgccacaagagccagactcctcctcgggcatcggcaagacaggccagcagcccgctaaaaagagactcaattttggtcagactggcgactcagagtcagtccccgatccacaacctctcggagaacctccagcagccccctcaggtctgggacctaatacaatggcttcaggcggtggcgctccaatggcagacaataacgaaggcgccgacggagtgggtaattcctcgggaaattggcattgcgattccacatggctgggggacagagtcatcaccaccagcacccgaacctgggccctgcccacctacaacaaccacctctacaagcaaatctccaacggcacctcgggaggaagcaccaacgacaacacctattttggctacagcaccccctgggggtattttgacttcaacagattccactgtcacttttcaccacgtgactggcaacgactcatcaacaacaattggggattccggcccaaaagactcaacttcaagctgttcaacatccaggtcaaggaagtcacgacgaacgaaggcaccaagaccatcgccaataatctcaccagcaccgtgcaggtctttacggactcggagtaccagttaccgtacgtgctaggatccgctcaccagggatgtctgcctccgttcccggcggacgtcttcatggttcctcagtacggctatttaactttaaacaatggaagccaagccctgggacgttcctccttctactgtctggagtatttcccatcgcagatgctgagaaccggcaacaactttcagttcagctacaccttcgaggacgtgcctttccacagcagctacgcgcacagccagagcctggacaggctgatgaatcccctcatcgaccagtacctgtactacctggtcagaacgcaaacgactggaactggagggacgcagactctggcattcagccaagcgggtcctagctcaatggccaaccaggctagaaattgggtgcccggaccttgctaccggcagcagcgcgtctccacgacaaccaaccagaacaacaacagcaactttgcctggacgggagctgccaagtttaagctgaacggccgagactctctaatgaatccgggcgtggcaatggcttcccacaaggatgacgacgaccgcttcttcccttcgagcggggtcctgatttttggcaagcaaggagccgggaacgatggagtggattacagccaagtgctgattacagatgaggaagaaatcaaggctaccaaccccgtggccacagaagaatatggagcagtggccatcaacaaccaggccgccaatacgcaggcgcagaccggactcgtgcacaaccagggggtgattcccggcatggtgtggcagaatagagacgtgtacctgcagggtcccatctgggccaaaattcctcacacggacggcaactttcacccgtctcccctgatgggcggctttggactgaagcacccgcctcctcaaattctcatcaagaacacaccggttccagcggacccgccgcttaccttcaaccaggccaagctgaactctttcatcacgcagtacagcaccggacaggtcagcgtggaaatcgagtgggagctgcagaaagaaaacagcaaacgctggaatccagagattcaatacacttccaactactacaaatctacaaatgtggactttgctgtcaacacggagggggtttatagcgagcctcgccccattggcacccgttacctcacccgcaacctgtaa

SEQ ID NO: 966 - DNA, 2211 bp, Artificial Sequence
  source: /note="Description of Artificial Sequence: Synthetic polynucleotide"
atggctgccgatggttatcttccagattggctcgaggacaaccttagtgaaggaattcgcgagtggtgggctttgaaacctggagcccctcaacccaaggcaaatcaacaacatcaagacaacgctcgaggtcttgtgcttccgggttacaaataccttggacccggcaacggactcgacaagggggagccggtcaacgcagcagacgcggcggccctcgagcacgacaaggcctacgaccagcagctcaaggccggagacaacccgtacctcaagtacaaccacgccgacgccgagttccaggagcggctcaaagaagatacgtcttttgggggcaacctcgggcgagcagtcttccaggccaaaaagaggcttcttgaacctcttggtctggttgaggaagcggctaaggcggctcctggaaagaagaggcctgtagagcagtctcctcaggaaccggactcctccgcgggtattggcaaatcgggtgcacagcccgctaaaaagagactcaatttcggtcagactggcgacacagagtcagtcccagaccctcaaccaatcggagaacctcccgcagccccctcaggtgtgggatctcttacaatggcttcaggtggtggcgcaccagtggcagacaataacgaaggtgccgatggagtgggtagttcctcgggaaattggcattgcgattcccaatggctgggggacagagtcatcaccaccagcacccgaacctgggccctgcccacctacaacaatcacctctacaagcaaatctccaacagcacatctggaggatcttcaaatgacaacgcctacttcggctacagcaccccctgggggtattttgacttcaacagattccactgccacttctcaccacgtgactggcagcgactcatcaacaacaactggggattccggcctaagcgactcaacttcaagctcttcaacattcaggtcaaagaggttacggacaacaatggagtcaagaccatcgccaataaccttaccagcacggtccaggtcttcacggactcagactatcagctcccgtacgtgctcgggtcggctcacgagggctgcctcccgccgttcccagcggacgttttcatgattcctcagtacgggtatctgacgcttaatgatggaagccaggccgtgggtcgttcgtccttttactgcctggaatatttcccgtcgcaaatgctaagaacgggtaacaacttccagttcaactacgagtttgagaacgtacctttccatagcagctacgctcacagccaaagcctggaccgactaatgaatccactcatcgaccaatacttgtactatctctcaaagactattaacgattctggacagaatcaacaaacgctaaaattcagtgtggccggacccagcaacatggctgtccagggaagaaactacatacctggacccagctaccgacaacaacgtgtctcaaccactgtgactcaaaacaacaacagcgaatttgcttggcctggagcttcttcttgggctctcaatggacgtaatagcttgatgaatcctggacctgctatggccagccacaaagaaggagaggaccgtttctttcctttgtctggatctttaatttttggcaaacaaggaactggaagagacaacgtggatgcggacgaagtcatgataaccaacgaagaagaaattaaaactactaacccggtagcaacggagtcctatggacaagtggccataaaccaccagagtgcccaagcacaggcgcagaccggctgggttcaaaaccaaggaatacttccgggtatggtttggcaggacagagatgtgtacctgcaaggacccatttgggccaaaattcctcacacggacggcaactttcacccttctccgctgatgggagggtttggaatgaagcacccgcctcctcagatcctcatcaaaaacacacctgtacctgcggatcctccaacggccttcaacaaggacaagctgaactctttcatcacccagtattctactggccaagtcagcgtggagatcgagtgggagctgcagaaggaaaacagcaagcgctggaacccggagatccagtacacttccaactattacaagtctaataatgttgaatttgctgttaatactgaaggtgtatatagtgaaccccgccccattggcaccagatacctgactcgtaatctgtaa

SEQ ID NO: 967 - DNA, 2277 bp, Artificial Sequence
  source: /note="Description of Artificial Sequence: Synthetic polynucleotide"
ctggctgccgatggttatcttccagattggctcgaggacaaccttagtgaaggaattcgcgagtggtgggctttgaaacctggagcccctcaacccaaggcaaatcaacaacatcaagacaacgctcgaggtcttgtgcttccgggttacaaataccttggacccggcaacggactcgacaagggggagccggtcaacgcagcagacgcggcggccctcgagcacgacaaggcctacgaccagcagctcaaggccggagacaacccgtacctcaagtacaaccacgccgacgccgagttccaggagcggctcaaagaagatacgtcttttgggggcaacctcgggcgagcagtcttccaggccaaaaagaggcttcttgaacctcttggtctggttgaggaagcggctaagatgaacaaccagaagatcgtgaacctgaaggagaaggtggcccagctggaggccggcggcggcggcagcgctcctggaaagaagaggcctgtagagcagtctcctcaggaaccggactcctccgcgggtattggcaaatcgggtgcacagcccgctaaaaagagactcaatttcggtcagactggcgacacagagtcagtcccagaccctcaaccaatcggagaacctcccgcagccccctcaggtgtgggatctcttacaatggcttcaggtggtggcgcaccagtggcagacaataacgaaggtgccgatggagtgggtagttcctcgggaaattggcattgcgattcccaatggctgggggacagagtcatcaccaccagcacccgaacctgggccctgcccacctacaacaatcacctctacaagcaaatctccaacagcacatctggaggatcttcaaatgacaacgcctacttcggctacagcaccccctgggggtattttgacttcaacagattccactgccacttctcaccacgtgactggcagcgactcatcaacaacaactggggattccggcctaagcgactcaacttcaagctcttcaacattcaggtcaaagaggttacggacaacaatggagtcaagaccatcgccaataaccttaccagcacggtccaggtcttcacggactcagactatcagctcccgtacgtgctcgggtcggctcacgagggctgcctcccgccgttcccagcggacgttttcatgattcctcagtacgggtatctgacgcttaatgatggaagccaggccgtgggtcgttcgtccttttactgcctggaatatttcccgtcgcaaatgctaagaacgggtaacaacttccagttcaactacgagtttgagaacgtacctttccatagcagctacgctcacagccaaagcctggaccgactaatgaatccactcatcgaccaatacttgtactatctctcaaagactattaacgattctggacagaatcaacaaacgctaaaattcagtgtggccggacccagcaacatggctgtccagggaagaaactacatacctggacccagctaccgacaacaacgtgtctcaaccactgtgactcaaaacaacaacagcgaatttgcttggcctggagcttcttcttgggctctcaatggacgtaatagcttgatgaatcctggacctgctatggccagccacaaagaaggagaggaccgtttctttcctttgtctggatctttaatttttggcaaacaaggaactggaagagacaacgtggatgcggacgaagtcatgataaccaacgaagaagaaattaaaactactaacccggtagcaacggagtcctatggacaagtggccataaaccaccagagtgcccaagcacaggcgcagaccggctgggttcaaaaccaaggaatacttccgggtatggtttggcaggacagagatgtgtacctgcaaggacccatttgggccaaaattcctcacacggacggcaactttcacccttctccgctgatgggagggtttggaatgaagcacccgcctcctcagatcctcatcaaaaacacacctgtacctgcggatcctccaacggccttcaacaaggacaagctgaactctttcatcacccagtattctactggccaagtcagcgtggagatcgagtgggagctgcagaaggaaaacagcaagcgctggaacccggagatccagtacacttccaactattacaagtctaataatgttgaatttgctgttaatactgaaggtgtatatagtgaaccccgccccattggcaccagatacctgactcgtaatctgtaa

SEQ ID NO: 968 - DNA, 2313 bp, Artificial Sequence
  source: /note="Description of Artificial Sequence: Synthetic polynucleotide"
ctggctgccgatggttatcttccagattggctcgaggacaaccttagtgaaggaattcgcgagtggtgggctttgaaacctggagcccctcaacccaaggcaaatcaacaacatcaagacaacgctcgaggtcttgtgcttccgggttacaaataccttggacccggcaacggactcgacaagggggagccggtcaacgcagcagacgcggcggccctcgagcacgacaaggcctacgaccagcagctcaaggccggagacaacccgtacctcaagtacaaccacgccgacgccgagttccaggagcggctcaaagaagatacgtcttttgggggcaacctcgggcgagcagtcttccaggccaaaaagaggcttcttgaacctcttggtctggttgaggaagcggctaagatgtataccatctggatgcccgagaaccccaggcccggtaccccctgcgacatcttcaccaacagcaggggcaagcgagccagcaacggcggcggcggcggcagcgctcctggaaagaagaggcctgtagagcagtctcctcaggaaccggactcctccgcgggtattggcaaatcgggtgcacagcccgctaaaaagagactcaatttcggtcagactggcgacacagagtcagtcccagaccctcaaccaatcggagaacctcccgcagccccctcaggtgtgggatctcttacaatggcttcaggtggtggcgcaccagtggcagacaataacgaaggtgccgatggagtgggtagttcctcgggaaattggcattgcgattcccaatggctgggggacagagtcatcaccaccagcacccgaacctgggccctgcccacctacaacaatcacctctacaagcaaatctccaacagcacatctggaggatcttcaaatgacaacgcctacttcggctacagcaccccctgggggtattttgacttcaacagattccactgccacttctcaccacgtgactggcagcgactcatcaacaacaactggggattccggcctaagcgactcaacttcaagctcttcaacattcaggtcaaagaggttacggacaacaatggagtcaagaccatcgccaataaccttaccagcacggtccaggtcttcacggactcagactatcagctcccgtacgtgctcgggtcggctcacgagggctgcctcccgccgttcccagcggacgttttcatgattcctcagtacgggtatctgacgcttaatgatggaagccaggccgtgggtcgttcgtccttttactgcctggaatatttcccgtcgcaaatgctaagaacgggtaacaacttccagttcaactacgagtttgagaacgtacctttccatagcagctacgctcacagccaaagcctggaccgactaatgaatccactcatcgaccaatacttgtactatctctcaaagactattaacgattctggacagaatcaacaaacgctaaaattcagtgtggccggacccagcaacatggctgtccagggaagaaactacatacctggacccagctaccgacaacaacgtgtctcaaccactgtgactcaaaacaacaacagcgaatttgcttggcctggagcttcttcttgggctctcaatggacgtaatagcttgatgaatcctggacctgctatggccagccacaaagaaggagaggaccgtttctttcctttgtctggatctttaatttttggcaaacaaggaactggaagagacaacgtggatgcggacgaagtcatgataaccaacgaagaagaaattaaaactactaacccggtagcaacggagtcctatggacaagtggccataaaccaccagagtgcccaagcacaggcgcagaccggctgggttcaaaaccaaggaatacttccgggtatggtttggcaggacagagatgtgtacctgcaaggacccatttgggccaaaattcctcacacggacggcaactttcacccttctccgctgatgggagggtttggaatgaagcacccgcctcctcagatcctcatcaaaaacacacctgtacctgcggatcctccaacggccttcaacaaggacaagctgaactctttcatcacccagtattctactggccaagtcagcgtggagatcgagtgggagctgcagaaggaaaacagcaagcgctggaacccggagatccagtacacttccaactattacaagtctaataatgttgaatttgctgttaatactgaaggtgtatatagtgaaccccgccccattggcaccagatacctgactcgtaatctgtaa

SEQ ID NO: 969 - DNA, 2283 bp, Artificial Sequence
  source: /note="Description of Artificial Sequence: Synthetic polynucleotide"
ctggctgccgatggttatcttccagattggctcgaggacaaccttagtgaaggaattcgcgagtggtgggctttgaaacctggagcccctcaacccaaggcaaatcaacaacatcaagacaacgctcgaggtcttgtgcttccgggttacaaataccttggacccggcaacggactcgacaagggggagccggtcaacgcagcagacgcggcggccctcgagcacgacaaggcctacgaccagcagctcaaggccggagacaacccgtacctcaagtacaaccacgccgacgccgagttccaggagcggctcaaagaagatacgtcttttgggggcaacctcgggcgagcagtcttccaggccaaaaagaggcttcttgaacctcttggtctggttgaggaagcggctaagatgaccttcttctacggcggcagcaggggcaagaggaacaacttcaagaccgaggagtacggcggcggcggcagcgctcctggaaagaagaggcctgtagagcagtctcctcaggaaccggactcctccgcgggtattggcaaatcgggtgcacagcccgctaaaaagagactcaatttcggtcagactggcgacacagagtcagtcccagaccctcaaccaatcggagaacctcccgcagccccctcaggtgtgggatctcttacaatggcttcaggtggtggcgcaccagtggcagacaataacgaaggtgccgatggagtgggtagttcctcgggaaattggcattgcgattcccaatggctgggggacagagtcatcaccaccagcacccgaacctgggccctgcccacctacaacaatcacctctacaagcaaatctccaacagcacatctggaggatcttcaaatgacaacgcctacttcggctacagcaccccctgggggtattttgacttcaacagattccactgccacttctcaccacgtgactggcagcgactcatcaacaacaactggggattccggcctaagcgactcaacttcaagctcttcaacattcaggtcaaagaggttacggacaacaatggagtcaagaccatcgccaataaccttaccagcacggtccaggtcttcacggactcagactatcagctcccgtacgtgctcgggtcggctcacgagggctgcctcccgccgttcccagcggacgttttcatgattcctcagtacgggtatctgacgcttaatgatggaagccaggccgtgggtcgttcgtccttttactgcctggaatatttcccgtcgcaaatgctaagaacgggtaacaacttccagttcaactacgagtttgagaacgtacctttccatagcagctacgctcacagccaaagcctggaccgactaatgaatccactcatcgaccaatacttgtactatctctcaaagactattaacgattctggacagaatcaacaaacgctaaaattcagtgtggccggacccagcaacatggctgtccagggaagaaactacatacctggacccagctaccgacaacaacgtgtctcaaccactgtgactcaaaacaacaacagcgaatttgcttggcctggagcttcttcttgggctctcaatggacgtaatagcttgatgaatcctggacctgctatggccagccacaaagaaggagaggaccgtttctttcctttgtctggatctttaatttttggcaaacaaggaactggaagagacaacgtggatgcggacgaagtcatgataaccaacgaagaagaaattaaaactactaacccggtagcaacggagtcctatggacaagtggccataaaccaccagagtgcccaagcacaggcgcagaccggctgggttcaaaaccaaggaatacttccgggtatggtttggcaggacagagatgtgtacctgcaaggacccatttgggccaaaattcctcacacggacggcaactttcacccttctccgctgatgggagggtttggaatgaagcacccgcctcctcagatcctcatcaaaaacacacctgtacctgcggatcctccaacggccttcaacaaggacaagctgaactctttcatcacccagtattctactggccaagtcagcgtggagatcgagtgggagctgcagaaggaaaacagcaagcgctggaacccggagatccagtacacttccaactattacaagtctaataatgttgaatttgctgttaatactgaaggtgtatatagtgaaccccgccccattggcaccagatacctgactcgtaatctgtaa

SEQ ID NO: 970 - DNA, 2283 bp, Artificial Sequence
  source: /note="Description of Artificial Sequence: Synthetic polynucleotide"
ctggctgccgatggttatcttccagattggctcgaggacaaccttagtgaaggaattcgcgagtggtgggctttgaaacctggagcccctcaacccaaggcaaatcaacaacatcaagacaacgctcgaggtcttgtgcttccgggttacaaataccttggacccggcaacggactcgacaagggggagccggtcaacgcagcagacgcggcggccctcgagcacgacaaggcctacgaccagcagctcaaggccggagacaacccgtacctcaagtacaaccacgccgacgccgagttccaggagcggctcaaagaagatacgtcttttgggggcaacctcgggcgagcagtcttccaggccaaaaagaggcttcttgaacctcttggtctggttgaggaagcggctaagatggcagctgcggccgccgcggctgcagcggctgcagccgccgcagctgcggctgcagcgggcggcggcggcagcgctcctggaaagaagaggcctgtagagcagtctcctcaggaaccggactcctccgcgggtattggcaaatcgggtgcacagcccgctaaaaagagactcaatttcggtcagactggcgacacagagtcagtcccagaccctcaaccaatcggagaacctcccgcagccccctcaggtgtgggatctcttacaatggcttcaggtggtggcgcaccagtggcagacaataacgaaggtgccgatggagtgggtagttcctcgggaaattggcattgcgattcccaatggctgggggacagagtcatcaccaccagcacccgaacctgggccctgcccacctacaacaatcacctctacaagcaaatctccaacagcacatctggaggatcttcaaatgacaacgcctacttcggctacagcaccccctgggggtattttgacttcaacagattccactgccacttctcaccacgtgactggcagcgactcatcaacaacaactggggattccggcctaagcgactcaacttcaagctcttcaacattcaggtcaaagaggttacggacaacaatggagtcaagaccatcgccaataaccttaccagcacggtccaggtcttcacggactcagactatcagctcccgtacgtgctcgggtcggctcacgagggctgcctcccgccgttcccagcggacgttttcatgattcctcagtacgggtatctgacgcttaatgatggaagccaggccgtgggtcgttcgtccttttactgcctggaatatttcccgtcgcaaatgctaagaacgggtaacaacttccagttcaactacgagtttgagaacgtacctttccatagcagctacgctcacagccaaagcctggaccgactaatgaatccactcatcgaccaatacttgtactatctctcaaagactattaacgattctggacagaatcaacaaacgctaaaattcagtgtggccggacccagcaacatggctgtccagggaagaaactacatacctggacccagctaccgacaacaacgtgtctcaaccactgtgactcaaaacaacaacagcgaatttgcttggcctggagcttcttcttgggctctcaatggacgtaatagcttgatgaatcctggacctgctatggccagccacaaagaaggagaggaccgtttctttcctttgtctggatctttaatttttggcaaacaaggaactggaagagacaacgtggatgcggacgaagtcatgataaccaacgaagaagaaattaaaactactaacccggtagcaacggagtcctatggacaagtggccataaaccaccagagtgcccaagcacaggcgcagaccggctgggttcaaaaccaaggaatacttccgggtatggtttggcaggacagagatgtgtacctgcaaggacccatttgggccaaaattcctcacacggacggcaactttcacccttctccgctgatgggagggtttggaatgaagcacccgcctcctcagatcctcatcaaaaacacacctgtacctgcggatcctccaacggccttcaacaaggacaagctgaactctttcatcacccagtattctactggccaagtcagcgtggagatcgagtgggagctgcagaaggaaaacagcaagcgctggaacccggagatccagtacacttccaactattacaagtctaataatgttgaatttgctgttaatactgaaggtgtatatagtgaaccccgccccattggcaccagatacctgactcgtaatctgtaa

SEQ ID NO: 971 - protein, 726 aa, Artificial Sequence
  source: /note="Description of Artificial Sequence: Synthetic polypeptide"
MEVQLQASGGGLVQAGGSLRLSCAASGFKITHYTMGWFRQAPGKEREFVSRITWGGDNTFYSNSVKGRFTISRDNAKNTVYLQMNSLKPEDTADYYCAAGSTSTATPLRVDYWGKGTQVTVSSGGGGSAPGKKRPVEQSPQEPDSSSGIGKTGQQPAKKRLNFGQTGDSESVPDPQPLGEPPAAPSGLGPNTMASGGGAPMADNNEGADGVGNSSGNWHCDSTWLGDRVITTSTRTWALPTYNNHLYKQISNGTSGGSTNDNTYFGYSTPWGYFDFNRFHCHFSPRDWQRLINNNWGFRPKRLNFKLFNIQVKEVTTNEGTKTIANNLTSTVQVFTDSEYQLPYVLGSAHQGCLPPFPADVFMVPQYGYLTLNNGSQALGRSSFYCLEYFPSQMLRTGNNFQFSYTFEDVPFHSSYAHSQSLDRLMNPLIDQYLYYLVRTQTTGTGGTQTLAFSQAGPSSMANQARNWVPGPCYRQQRVSTTTNQNNNSNFAWTGAAKFKLNGRDSLMNPGVAMASHKDDDDRFFPSSGVLIFGKQGAGNDGVDYSQVLITDEEEIKATNPVATEEYGAVAINNQAANTQAQTGLVHNQGVIPGMVWQNRDVYLQGPIWAKIPHTDGNFHPSPLMGGFGLKHPPPQILIKNTPVPADPPLTFNQAKLNSFITQYSTGQVSVEIEWELQKENSKRWNPEIQYTSNYYKSTNVDFAVNTEGVYSEPRPIGTRYLTRNL

SEQ ID NO: 972 - protein, 729 aa, Artificial Sequence
  source: /note="Description of Artificial Sequence: Synthetic polypeptide"
MEVQLQASGGGLVQAGGSLRLSCSASVRTFSIYAMGWFRQAPGKEREFVAGINRSGDVTKYADFVKGRFSISRDNAKNMVYLQMNSLKPEDTALYYCAATWAYDTVGALTSGYNFWGQGTQVTVSSGGGGSAPGKKRPVEQSPQEPDSSSGIGKTGQQPAKKRLNFGQTGDSESVPDPQPLGEPPAAPSGLGPNTMASGGGAPMADNNEGADGVGNSSGNWHCDSTWLGDRVITTSTRTWALPTYNNHLYKQISNGTSGGSTNDNTYFGYSTPWGYFDFNRFHCHFSPRDWQRLINNNWGFRPKRLNFKLFNIQVKEVTTNEGTKTIANNLTSTVQVFTDSEYQLPYVLGSAHQGCLPPFPADVFMVPQYGYLTLNNGSQALGRSSFYCLEYFPSQMLRTGNNFQFSYTFEDVPFHSSYAHSQSLDRLMNPLIDQYLYYLVRTQTTGTGGTQTLAFSQAGPSSMANQARNWVPGPCYRQQRVSTTTNQNNNSNFAWTGAAKFKLNGRDSLMNPGVAMASHKDDDDRFFPSSGVLIFGKQGAGNDGVDYSQVLITDEEEIKATNPVATEEYGAVAINNQAANTQAQTGLVHNQGVIPGMVWQNRDVYLQGPIWAKIPHTDGNFHPSPLMGGFGLKHPPPQILIKNTPVPADPPLTFNQAKLNSFITQYSTGQVSVEIEWELQKENSKRWNPEIQYTSNYYKSTNVDFAVNTEGVYSEPRPIGTRYLTRNL

SEQ ID NO: 973 - protein, 651 aa, Artificial Sequence
  source: /note="Description of Artificial Sequence: Synthetic polypeptide"
MPSSVIDALQYKLEGTTRLTRKRGLKLATALSLSNKFVEGSPSGGGGSGGGGSAPGKKRPVEQSPQEPDSSSGIGKTGQQPAKKRLNFGQTGDSESVPDPQPLGEPPAAPSGLGPNTMASGGGAPMADNNEGADGVGNSSGNWHCDSTWLGDRVITTSTRTWALPTYNNHLYKQISNGTSGGSTNDNTYFGYSTPWGYFDFNRFHCHFSPRDWQRLINNNWGFRPKRLNFKLFNIQVKEVTTNEGTKTIANNLTSTVQVFTDSEYQLPYVLGSAHQGCLPPFPADVFMVPQYGYLTLNNGSQALGRSSFYCLEYFPSQMLRTGNNFQFSYTFEDVPFHSSYAHSQSLDRLMNPLIDQYLYYLVRTQTTGTGGTQTLAFSQAGPSSMANQARNWVPGPCYRQQRVSTTTNQNNNSNFAWTGAAKFKLNGRDSLMNPGVAMASHKDDDDRFFPSSGVLIFGKQGAGNDGVDYSQVLITDEEEIKATNPVATEEYGAVAINNQAANTQAQTGLVHNQGVIPGMVWQNRDVYLQGPIWAKIPHTDGNFHPSPLMGGFGLKHPPPQILIKNTPVPADPPLTFNQAKLNSFITQYSTGQVSVEIEWELQKENSKRWNPEIQYTSNYYKSTNVDFAVNTEGVYSEPRPIGTRYLTRNL

SEQ ID NO: 974 - protein, 638 aa, Artificial Sequence
  source: /note="Description of Artificial Sequence: Synthetic polypeptide"
MYTIWMPENPRPGTPCDIFTNSRGKRASNGGGGGSGGGGSAPGKKRPVEQSPQEPDSSSGIGKTGQQPAKKRLNFGQTGDSESVPDPQPLGEPPAAPSGLGPNTMASGGGAPMADNNEGADGVGNSSGNWHCDSTWLGDRVITTSTRTWALPTYNNHLYKQISNGTSGGSTNDNTYFGYSTPWGYFDFNRFHCHFSPRDWQRLINNNWGFRPKRLNFKLFNIQVKEVTTNEGTKTIANNLTSTVQVFTDSEYQLPYVLGSAHQGCLPPFPADVFMVPQYGYLTLNNGSQALGRSSFYCLEYFPSQMLRTGNNFQFSYTFEDVPFHSSYAHSQSLDRLMNPLIDQYLYYLVRTQTTGTGGTQTLAFSQAGPSSMANQARNWVPGPCYRQQRVSTTTNQNNNSNFAWTGAAKFKLNGRDSLMNPGVAMASHKDDDDRFFPSSGVLIFGKQGAGNDGVDYSQVLITDEEEIKATNPVATEEYGAVAINNQAANTQAQTGLVHNQGVIPGMVWQNRDVYLQGPIWAKIPHTDGNFHPSPLMGGFGLKHPPPQILIKNTPVPADPPLTFNQAKLNSFITQYSTGQVSVEIEWELQKENSKRWNPEIQYTSNYYKSTNVDFAVNTEGVYSEPRPIGTRYLTRNL

SEQ ID NO: 975 - protein, 628 aa, Artificial Sequence
  source: /note="Description of Artificial Sequence: Synthetic polypeptide"
MTFFYGGSRGKRNNFKTEEYGGGGSGGGGSAPGKKRPVEQSPQEPDSSSGIGKTGQQPAKKRLNFGQTGDSESVPDPQPLGEPPAAPSGLGPNTMASGGGAPMADNNEGADGVGNSSGNWHCDSTWLGDRVITTSTRTWALPTYNNHLYKQISNGTSGGSTNDNTYFGYSTPWGYFDFNRFHCHFSPRDWQRLINNNWGFRPKRLNFKLFNIQVKEVTTNEGTKTIANNLTSTVQVFTDSEYQLPYVLGSAHQGCLPPFPADVFMVPQYGYLTLNNGSQALGRSSFYCLEYFPSQMLRTGNNFQFSYTFEDVPFHSSYAHSQSLDRLMNPLIDQYLYYLVRTQTTGTGGTQTLAFSQAGPSSMANQARNWVPGPCYRQQRVSTTTNQNNNSNFAWTGAAKFKLNGRDSLMNPGVAMASHKDDDDRFFPSSGVLIFGKQGAGNDGVDYSQVLITDEEEIKATNPVATEEYGAVAINNQAANTQAQTGLVHNQGVIPGMVWQNRDVYLQGPIWAKIPHTDGNFHPSPLMGGFGLKHPPPQILIKNTPVPADPPLTFNQAKLNSFITQYSTGQVSVEIEWELQKENSKRWNPEIQYTSNYYKSTNVDFAVNTEGVYSEPRPIGTRYLTRNL

SEQ ID NO: 976 - protein, 621 aa, Artificial Sequence
  source: /note="Description of Artificial Sequence: Synthetic polypeptide"
MNNQKIVNLKEKVAQLEAGGGGSAPGKKRPVEQSPQEPDSSAGIGKSGAQPAKKRLNFGQTGDTESVPDPQPIGEPPAAPSGVGSLTMASGGGAPVADNNEGADGVGSSSGNWHCDSQWLGDRVITTSTRTWALPTYNNHLYKQISNSTSGGSSNDNAYFGYSTPWGYFDFNRFHCHFSPRDWQRLINNNWGFRPKRLNFKLFNIQVKEVTDNNGVKTIANNLTSTVQVFTDSDYQLPYVLGSAHEGCLPPFPADVFMIPQYGYLTLNDGSQAVGRSSFYCLEYFPSQMLRTGNNFQFNYEFENVPFHSSYAHSQSLDRLMNPLIDQYLYYLSKTINDSGQNQQTLKFSVAGPSNMAVQGRNYIPGPSYRQQRVSTTVTQNNNSEFAWPGASSWALNGRNSLMNPGPAMASHKEGEDRFFPLSGSLIFGKQGTGRDNVDADEVMITNEEEIKTTNPVATESYGQVAINHQSAQAQAQTGWVQNQGILPGMVWQDRDVYLQGPIWAKIPHTDGNFHPSPLMGGFGMKHPPPQILIKNTPVPADPPTAFNKDKLNSFITQYSTGQVSVEIEWELQKENSKRWNPEIQYTSNYYKSNNVEFAVNTEGVYSEPRPIGTRYLTRNL

SEQ ID NO: 977 - protein, 633 aa, Artificial Sequence
  source: /note="Description of Artificial Sequence: Synthetic polypeptide"
MYTIWMPENPRPGTPCDIFTNSRGKRASNGGGGGSAPGKKRPVEQSPQEPDSSAGIGKSGAQPAKKRLNFGQTGDTESVPDPQPIGEPPAAPSGVGSLTMASGGGAPVADNNEGADGVGSSSGNWHCDSQWLGDRVITTSTRTWALPTYNNHLYKQISNSTSGGSSNDNAYFGYSTPWGYFDFNRFHCHFSPRDWQRLINNNWGFRPKRLNFKLFNIQVKEVTDNNGVKTIANNLTSTVQVFTDSDYQLPYVLGSAHEGCLPPFPADVFMIPQYGYLTLNDGSQAVGRSSFYCLEYFPSQMLRTGNNFQFNYEFENVPFHSSYAHSQSLDRLMNPLIDQYLYYLSKTINDSGQNQQTLKFSVAGPSNMAVQGRNYIPGPSYRQQRVSTTVTQNNNSEFAWPGASSWALNGRNSLMNPGPAMASHKEGEDRFFPLSGSLIFGKQGTGRDNVDADEVMITNEEEIKTTNPVATESYGQVAINHQSAQAQAQTGWVQNQGILPGMVWQDRDVYLQGPIWAKIPHTDGNFHPSPLMGGFGMKHPPPQILIKNTPVPADPPTAFNKDKLNSFITQYSTGQVSVEIEWELQKENSKRWNPEIQYTSNYYKSNNVEFAVNTEGVYSEPRPIGTRYLTRNL

SEQ ID NO: 978 - protein, 623 aa, Artificial Sequence
  source: /note="Description of Artificial Sequence: Synthetic polypeptide"
MTFFYGGSRGKRNNFKTEEYGGGGSAPGKKRPVEQSPQEPDSSAGIGKSGAQPAKKRLNFGQTGDTESVPDPQPIGEPPAAPSGVGSLTMASGGGAPVADNNEGADGVGSSSGNWHCDSQWLGDRVITTSTRTWALPTYNNHLYKQISNSTSGGSSNDNAYFGYSTPWGYFDFNRFHCHFSPRDWQRLINNNWGFRPKRLNFKLFNIQVKEVTDNNGVKTIANNLTSTVQVFTDSDYQLPYVLGSAHEGCLPPFPADVFMIPQYGYLTLNDGSQAVGRSSFYCLEYFPSQMLRTGNNFQFNYEFENVPFHSSYAHSQSLDRLMNPLIDQYLYYLSKTINDSGQNQQTLKFSVAGPSNMAVQGRNYIPGPSYRQQRVSTTVTQNNNSEFAWPGASSWALNGRNSLMNPGPAMASHKEGEDRFFPLSGSLIFGKQGTGRDNVDADEVMITNEEEIKTTNPVATESYGQVAINHQSAQAQAQTGWVQNQGILPGMVWQDRDVYLQGPIWAKIPHTDGNFHPSPLMGGFGMKHPPPQILIKNTPVPADPPTAFNKDKLNSFITQYSTGQVSVEIEWELQKENSKRWNPEIQYTSNYYKSNNVEFAVNTEGVYSEPRPIGTRYLTRNL

SEQ ID NO: 979 - protein, 623 aa, Artificial Sequence
  source: /note="Description of Artificial Sequence: Synthetic polypeptide"
MAAAAAAAAAAAAAAAAAAAGGGGSAPGKKRPVEQSPQEPDSSAGIGKSGAQPAKKRLNFGQTGDTESVPDPQPIGEPPAAPSGVGSLTMASGGGAPVADNNEGADGVGSSSGNWHCDSQWLGDRVITTSTRTWALPTYNNHLYKQISNSTSGGSSNDNAYFGYSTPWGYFDFNRFHCHFSPRDWQRLINNNWGFRPKRLNFKLFNIQVKEVTDNNGVKTIANNLTSTVQVFTDSDYQLPYVLGSAHEGCLPPFPADVFMIPQYGYLTLNDGSQAVGRSSFYCLEYFPSQMLRTGNNFQFNYEFENVPFHSSYAHSQSLDRLMNPLIDQYLYYLSKTINDSGQNQQTLKFSVAGPSNMAVQGRNYIPGPSYRQQRVSTTVTQNNNSEFAWPGASSWALNGRNSLMNPGPAMASHKEGEDRFFPLSGSLIFGKQGTGRDNVDADEVMITNEEEIKTTNPVATESYGQVAINHQSAQAQAQTGWVQNQGILPGMVWQDRDVYLQGPIWAKIPHTDGNFHPSPLMGGFGMKHPPPQILIKNTPVPADPPTAFNKDKLNSFITQYSTGQVSVEIEWELQKENSKRWNPEIQYTSNYYKSNNVEFAVNTEGVYSEPRPIGTRYLTRNL

SEQ ID NO: 980 - DNA, 2214 bp, Artificial Sequence
  source: /note="Description of Artificial Sequence: Synthetic polynucleotide"
atggctgccgatggttatcttccagattggctcgaggacaacctctctgagggcattcgcgagtggtgggacttgaaacctggagccccgaagcccaaagccaaccagcaaaagcaggacgacggccggggtctggtgcttcctggctacaagtacctcggacccttcaacggactcgacaagggggagcccgtcaacgcggcggacgcagcggccctcgagcacgacaaggcctacgaccagcagctcaaagcgggtgacaatccgtacctgcggtataaccacgccgacgtcgagtttcaggagcgtctgcaagaagatacgtcttttgggggcaacctcgggcgagcagtcttccaggccaagaagagggttctcgaaccttttggtctggttgaggaaggcgctaagacggctcctggaaagaaacgtccggtagagcagtcgccacaagagccagactcctcctcgggcatcggcaagaaaggccaacagcccgccagaaaaagactcaattttggccagactggcgactcagagtcagttccagaccctcaacctctcggagaacctccagcagcgccctctggtgtgggacctaatacaatggctgcaggcggtggcgcaccaatggcagacaataacgagggcgccgacggagtgggtaattcctcgggaaattggcattgcgattccacatggatgggggacagagtcatcaccaccagcacccgaacctgggccctgcccacctacaacaaccacctctacaagcaaatctccaacggcacctcgggaggaagcaccaacgacaacacctattttggctacagcaccccctgggggtattttgatttcaacagattccactgccacttctcaccacgtgactggcagcgactcatcaacaacaactggggattccggccaaaaagactcagcttcaagctcttcaacatccaggtcaaggaggtcacgcagaatgaaggcaccaagaccatcgccaataaccttaccagcacgattcaggtatttacggactcggaataccagctgccatacgtcctcggctccgcgcaccagggctgcctgcctccgttcccggcggacgtcttcatgattccccagtacggctaccttacactgaacaatggaagtcaagccgtaggccgttcctccttctactgcctggaatattttccttctcaaatgctgagaacgggcaacaactttgagttcagctaccagtttgaggacgtgccttttcacagcagctacgcgcacagccaaagcctggaccggctgatgaaccccctcatcgaccagtacctgtactacctgtctcggactcagtccacgggaggtaccgcaagaactcagcagttgctattttctcaggccgggcctaatacaatggccaatcaggcaaagaactggctgccaggaccctgttaccgccaacaacgcgtctcaacgacaaccgggcaaaacaacaatagcaactctgcctggactgctgggaccaaataccatctgaatggaagaaattcattggctaatcctggcatcgctatggcaacacacaaagacgacgaggagcgtttttttcccagtaacgggatcctgatttttggcaaacaaaatgctgccagagacaatgcggattacagcgatgtcatgctcaccagcgaggaagaaatcaaaaccactaaccctgtggctacagaggaatacggtatcgtggcagataacttgcagcagcaaaacacggctcctcaaattggaactgtcaacagccagggggccttacccggtatggtctggcagaaccgggacgtgtacctgcagggtcccatctgggccaagattcctcacacggacggcaacttccacccatctccgctgatgggcggctttggcctgaaacatcctccgcctcagatcctgatcaagaacacgcctgtacctgcggatcctccgaccaccttcaaccagtcaaagctgaactctttcatcacgcaatacagcaccggacaggtcagcgtggaaattgaatgggagctacagaaggaaaacagcaagcgctggaaccccgagatccagtacacctccaactactacaaatctacaagtgtggactttgctgttaatacagaaggcgtgtactctgaaccccgccccattggcacccgttacctcacccgtaatctgtaa

SEQ ID NO: 981 - DNA, 2214 bp, Artificial Sequence
  source: /note="Description of Artificial Sequence: Synthetic polynucleotide"
atggctgccgatggttatcttccagattggctcgaggacaacctctctgagggcattcgcgagtggtgggcgctgaaacctggagccccgaagcccaaagccaaccagcaaaagcaggacgacggccggggtctggtgcttcctggctacaagtacctcggacccttcaacggactcgacaagggggagcccgtcaacgcggcggacgcagcggccctcgagcacgacaaggcctacgaccagcagctcaaagcgggtgacaatccgtacctgcggtataaccacgccgacgccgagtttcaggagcgtctgcaagaagatacgtcttttgggggcaacctcgggcgagcagtcttccaggccaagaagcgggttctcgaacctctcggtctggttgaggacggcgctaagacggctcctggaaagaagagaccagtagagcagtcaccccaagaaccagactcctcctcgggcatcggcaagaaaggccaacagcccgccagaaaaagactcaattttggccagactggcgactcagagtcagttccagaccctcaacctctcggagaacctccagcaacccccgctgctgtgggacctactacaatggcttcaggcggtggcgcaccaatggcagacaataacgaaggcgccgacggagtgggtagttcctcgggaaattggcattgcgattccacatggctgggcgacagagtcatcaccaccagcacccgaacctgggccctgcccacctacaacaaccacctctacaagcaaatctccaacgggacatcgggaggagccaccaacgacaacacctacttcggctacagcaccccctgggggtattttgactttaacagattccactgccacttttcaccacgtgactggcagcgactcatcaacaacaactggggattccggcccaagagactcagcttcaagctcttcaacatccaggtcaaggaggtcacgcagaatgaaggcaccaagaccatcgccaataacctcaccagcaccatccaggtgtttacggactcggagtaccagctgccgtacgttctcggctctgcccaccagggctgcctgcctccgttcccggcggacgtgttcatgattccccagtacggctacctaacactcaacaacggtagtcaggccgtgggacgctcctccttctactgcctggaatactttccttcgcagatgctgagaaccggcaacaacttccagtttacttacaccttcgaggacgtgcctttccacagcagctacgcccacagccagagcttggaccggctgatgaatcctctgattgaccagtacctgtactacttgtctcggactcaaacaacaggaggcacggcaaatacgcagactctgggcttcagccaaggtgggcctaatacaatggccaatcaggcaaagaactggctgccaggaccctgttaccgccaacaacgcgtctcaacgacaaccgggcaaaacaacaatagcaactttgcctggactgctgggaccaaataccatctgaatggaagaaattcattggctaatcctggcatcgctatggcaacacacaaggacgacgaggagcgtttttttcccagtaacgggatcctgatttttggcaaacaaaatgctgccagagacaatgcggattacagcgatgtcatgctcaccagcgaggaagaaatcaaaaccactaaccctgtggctacagaggaatacggtatcgtggcagataacttgcagcagcaaaacacggctcctcaaattggaactgtcaacagccagggggccttacccggtatggtctggcagaaccgggacgtgtacctgcagggtcccatctgggccaagattcctcacacggacggcaacttccacccgtctccgctgatgggcggctttggcctgaaacatcctccgcctcagatcctgatcaagaacacgcctgtacctgcggatcctccgaccaccttcaaccagtcaaagctgaactctttcatcacgcaatacagcaccggacaggtcagcgtggaaatcgagtgggagctgcagaaagaaaacagcaagcgctggaaccccgagatccagtacacctccaactactacaaatctacaaatgtggactttgctgtcaacacggagggggtttatagcgagcctcgccccattggcacccgttacctcacccgcaacctgtaa

SEQ ID NO: 982 - DNA, 2211 bp, Artificial Sequence
  source: /note="Description of Artificial Sequence: Synthetic polynucleotide"
  modified_base (715)..(715): a, c, t, or g
atggctgccgatggttatcttccagattggctcgaggacaacctctctgagggcattcgcgagtggtgggcgctgaaacctggagccccgaagcccaaagccaaccagcaaaagcaggacgacggccggggtctggtgcttcctggctacaagtacctcggacccttcaacggactcgacaagggggagcccgtcaacgcggcggacgcagcggccctcgagcacgacaaggcctacgaccagcagctcaaagcgggtgacaatccgtacctgcggtataaccacgccgacgccgagtttcaggagcgtctgcaagaagatacgtcttttgggggcaacctcgggcgagcagtcttccaggccaagaagcgggttctcgaacctctcggtctggttgaggaaggcgctaagacggctcctggaaagaaacgtccggtagagcagtcgccacaagagccagactcctcctcgggcatcggcaagacaggccagcagcccgctaaaaagaggctcaattttggtcagactggcgactcagagtcagtccccgacccacaacctctcggagaacctccagcaacccccgctgctgtgggacctactacaatggcttcaggcggtggcgcaccaatggcagacaataacgaaggcgccgacggagtgggtaatgcctcaggaaattggcattgcgattccacatggctgggcgacagantcatcaccaccagcacccgaacatgggccttgcccacctataacaaccacctctacaagcaaatctccagtgcttcaacgggggccagcaacgacaaccactacttcggctacagcaccccctgggggtattttgatttcaacagattccactgccatttctcaccacgtgactggcagcgactcatcaacaacaattggggattccggcccaagagactcaacttcaagctcttcaacatccaagtcaaggaggtcacgcagaatgaaggcaccaagaccatcgccaataacctcaccagcaccatccaggtgtttacggactcggagtaccagctgccgtacgttctcggctctgcccaccagggctgcctgcctccgttcccggcggacgtgttcatgattccccagtacggctacctaacactcaacaacggtagtcaggccgtgggacgctcctccttctactgcctggaatattttccatctcaaatgctgcgaactggaaacaattttgaattcagctacaccttcgaggacgtgcctttccacagcagctacgcacacagccagagcttggaccgactgatgaatcctctcatcgaccagtacctgtactacttgtctcggactcaaacaacaggaggcacggcaaatacgcagactctgggcttcagccaaggtgggcctaatacaatggccaatcaggcaaagaactggctgccaggaccctgttaccgccaacaacgcgtctcaacgacaaccgggcaaaacaacaatagcaactttgcctggactgctgggaccaaataccatctgaatggaagaaattcattggctaatcctggcatcgctatggcaacacacaaagacgacgaggagcgtttttttcccagtaacgggatcctgatttttggcaaacaaaatgctgccagagacaatgcggattacagcgatgtcatgctcaccagcgaggaagaaatcaaaaccactaaccctgtggctacagaggaatacggtatcgtggcagataacttgcagcagcaaaacacggctcctcaaattggaactgtcaacagccaggggaccttacccggtatggtctggcagaaccgggacgtgtacctgcagggtcccatctgggccaagattcctcacacggacggcaacttccacccgtctccgctgatgggcggctttggcctgaaacatcctccgcctcagatcctgatcaagaacacgcctgtacctgcggatcctccgaccaccttcaaccagtcaaagctgaactctttcatcacgcaatacagcaccggacaggtcagcgtggaaattgaatgggagctacagaaggaaaacagcaagcgctggaaccccgagatccagtacacctccaattactacaaatctacaagtgtggactttgctgttaatacagaaggcgtgtactctgaaccccgccccattggcacgcgtttcctcacccgtaatctgtaa

SEQ ID NO: 983 - DNA, 2214 bp, Artificial Sequence
  source: /note="Description of Artificial Sequence: Synthetic polynucleotide"
atggctgccgatggttatcttccagattggctcgaggacaacctctctgagggcattcgcgagtggtgggcgctgaaacctggagccccgaagcccaaagccaaccagcaaaagcaggacgacggccggggtctggtgcttcctggctacaagtacctcggacccttcaacggactcgacaagggggagcccgtcaacgcggcggacgcagcggccctcgagcacgacaaggcctacgaccagcagctcaaagcgggtgacaatccgtacctgcggtataaccacgccgacgccgagtttcaggagcgtctgcaagaagatacgtcttttgggggcaacctcgggcgagcagtcttccaggccaagaagcgggttctcgaacctctcggtctggttgaggaaggcgctaagacggctcctggaaagaaacgtccggtagagcagtcgccacaagagccagactcctcctcgggcatcggcaagacaggccagcagcccgctaaaaagaggctcaattttggccagactggcgactcagagtcagttccagaccctcaacctctcggagaacctccagcagcgccctctggtgtgggacctaatacaatggctgcaggcggtggcgcaccaatggcagacaataacgaaggcgccgacggagtgggtagttcctcgggaaattggcattgcgattccacatggctgggcgacagagtcatcaccaccagcacccgaacctgggccctgcccacctacaacaaccacctctacaagcaaatctccaacgggacatcgggaggagccaccaacgacaacacctacttcggctacagcaccccctgggggtattttgactttaacagattccactgccacttttcaccacgtgactggcagcgactcatcaacaacaactggggattccggcccaagagactcagcttcaagctcttcaacatccaggtcaaggaggtcacgcagaatgaaggcaccaagaccatcgccaataacctcaccagcaccatccaggtgtttacggactcggagtaccagctgccgtacgtactaggatccgctcaccagggatgtctgcctccgttcccggcggacgtgttcatgattccccagtacggctacctaacactcaacaacggtagtcaggccgtgggacgctcctccttctactgcctggaatattttccatctcagatgctgagaacgggcaataactttaccttcagctacaccttcgaggacgtgcctttccacagcagctatgcccacagccagagcttggaccggctgatgaatcctctgattgaccagtacctgtactacttgtctcggactcaaacaacaggaggcacggcaaatacgcagactctgggcttcagccaaggtgggcctaatacaatggccaatcaggcaaagaactggctgccaggaccctgttaccgccaacaacgcgtctcaacgacaaccgggcaaaacaacaatagcaactttgcctggactgctgggaccaaataccatctgaatggaagaaattcattggctaatcctggcatcgctatggcaacacacaaagacgacgaggagcgtttttttcccagtaacgggatcctgatttttggcaaacaaaatgctgccagagacaatgcggattacagcgatgtcatgctcaccagcgaggaagaaatcaaaaccactaaccctgtggctacagaggaatacggtatcgtggcagataacttgcagcagcaaaacacggctcctcaaattggaactgtcaacagccagggggccttacccggtatggtctggcagaaccgggacgtgtacctgcagggtcccatctgggccaagattcctcacacggacggcaacttccacccgtctccgctaatgggaggatttggactgaagcacccacctcctcagatcctgatcaagaacacgccggtacctgcggatcctccgaccaccttcaaccagtcaaagctgtactctttcatcacgcaatacagcaccggacaggtcagcgtggaaattgaatgggagctgcagaaggaaaacagcaagcgctggaaccccgagatccaatacacctccaactactacaaatctacaagtgtggactttgctgttaatacagaaggcgtgtactctgaaccccgccccattggcacccgttacctcacccgtaatctgtaa

SEQ ID NO: 984 - protein, 737 aa, Artificial Sequence
  source: /note="Description of Artificial Sequence: Synthetic polypeptide"
MAADGYLPDWLEDNLSEGIREWWDLKPGAPKPKANQQKQDDGRGLVLPGYKYLGPFNGLDKGEPVNAADAAALEHDKAYDQQLKAGDNPYLRYNHADVEFQERLQEDTSFGGNLGRAVFQAKKRVLEPFGLVEEGAKTAPGKKRPVEQSPQEPDSSSGIGKKGQQPARKRLNFGQTGDSESVPDPQPLGEPPAAPSGVGPNTMAAGGGAPMADNNEGADGVGNSSGNWHCDSTWMGDRVITTSTRTWALPTYNNHLYKQISNGTSGGSTNDNTYFGYSTPWGYFDFNRFHCHFSPRDWQRLINNNWGFRPKRLSFKLFNIQVKEVTQNEGTKTIANNLTSTIQVFTDSEYQLPYVLGSAHQGCLPPFPADVFMIPQYGYLTLNNGSQAVGRSSFYCLEYFPSQMLRTGNNFEFSYQFEDVPFHSSYAHSQSLDRLMNPLIDQYLYYLSRTQSTGGTARTQQLLFSQAGPNTMANQAKNWLPGPCYRQQRVSTTTGQNNNSNSAWTAGTKYHLNGRNSLANPGIAMATHKDDEERFFPSNGILIFGKQNAARDNADYSDVMLTSEEEIKTTNPVATEEYGIVADNLQQQNTAPQIGTVNSQGALPGMVWQNRDVYLQGPIWAKIPHTDGNFHPSPLMGGFGLKHPPPQILIKNTPVPADPPTTFNQSKLNSFITQYSTGQVSVEIEWELQKENSKRWNPEIQYTSNYYKSTSVDFAVNTEGVYSEPRPIGTRYLTRNL

SEQ ID NO: 985 - protein, 737 aa, Artificial Sequence
  source: /note="Description of Artificial Sequence: Synthetic polypeptide"
MAADGYLPDWLEDNLSEGIREWWALKPGAPKPKANQQKQDDGRGLVLPGYKYLGPFNGLDKGEPVNAADAAALEHDKAYDQQLKAGDNPYLRYNHADAEFQERLQEDTSFGGNLGRAVFQAKKRVLEPLGLVEDGAKTAPGKKRPVEQSPQEPDSSSGIGKKGQQPARKRLNFGQTGDSESVPDPQPLGEPPATPAAVGPTTMASGGGAPMADNNEGADGVGSSSGNWHCDSTWLGDRVITTSTRTWALPTYNNHLYKQISNGTSGGATNDNTYFGYSTPWGYFDFNRFHCHFSPRDWQRLINNNWGFRPKRLSFKLFNIQVKEVTQNEGTKTIANNLTSTIQVFTDSEYQLPYVLGSAHQGCLPPFPADVFMIPQYGYLTLNNGSQAVGRSSFYCLEYFPSQMLRTGNNFQFTYTFEDVPFHSSYAHSQSLDRLMNPLIDQYLYYLSRTQTTGGTANTQTLGFSQGGPNTMANQAKNWLPGPCYRQQRVSTTTGQNNNSNFAWTAGTKYHLNGRNSLANPGIAMATHKDDEERFFPSNGILIFGKQNAARDNADYSDVMLTSEEEIKTTNPVATEEYGIVADNLQQQNTAPQIGTVNSQGALPGMVWQNRDVYLQGPIWAKIPHTDGNFHPSPLMGGFGLKHPPPQILIKNTPVPADPPTTFNQSKLNSFITQYSTGQVSVEIEWELQKENSKRWNPEIQYTSNYYKSTNVDFAVNTEGVYSEPRPIGTRYLTRNL

SEQ ID NO: 986 - protein, 736 aa, Artificial Sequence
  source: /note="Description of Artificial Sequence: Synthetic polypeptide"
  MOD_RES (239)..(239): Any naturally occurring amino acid
MAADGYLPDWLEDNLSEGIREWWALKPGAPKPKANQQKQDDGRGLVLPGYKYLGPFNGLDKGEPVNAADAAALEHDKAYDQQLKAGDNPYLRYNHADAEFQERLQEDTSFGGNLGRAVFQAKKRVLEPLGLVEEGAKTAPGKKRPVEQSPQEPDSSSGIGKTGQQPAKKRLNFGQTGDSESVPDPQPLGEPPATPAAVGPTTMASGGGAPMADNNEGADGVGNASGNWHCDSTWLGDRXITTSTRTWALPTYNNHLYKQISSASTGASNDNHYFGYSTPWGYFDFNRFHCHFSPRDWQRLINNNWGFRPKRLNFKLFNIQVKEVTQNEGTKTIANNLTSTIQVFTDSEYQLPYVLGSAHQGCLPPFPADVFMIPQYGYLTLNNGSQAVGRSSFYCLEYFPSQMLRTGNNFEFSYTFEDVPFHSSYAHSQSLDRLMNPLIDQYLYYLSRTQTTGGTANTQTLGFSQGGPNTMANQAKNWLPGPCYRQQRVSTTTGQNNNSNFAWTAGTKYHLNGRNSLANPGIAMATHKDDEERFFPSNGILIFGKQNAARDNADYSDVMLTSEEEIKTTNPVATEEYGIVADNLQQQNTAPQIGTVNSQGTLPGMVWQNRDVYLQGPIWAKIPHTDGNFHPSPLMGGFGLKHPPPQILIKNTPVPADPPTTFNQSKLNSFITQYSTGQVSVEIEWELQKENSKRWNPEIQYTSNYYKSTSVDFAVNTEGVYSEPRPIGTRFLTRNL

SEQ ID NO: 987 - protein, 737 aa, Artificial Sequence
  source: /note="Description of Artificial Sequence: Synthetic polypeptide"
MAADGYLPDWLEDNLSEGIREWWALKPGAPKPKANQQKQDDGRGLVLPGYKYLGPFNGLDKGEPVNAADAAALEHDKAYDQQLKAGDNPYLRYNHADAEFQERLQEDTSFGGNLGRAVFQAKKRVLEPLGLVEEGAKTAPGKKRPVEQSPQEPDSSSGIGKTGQQPAKKRLNFGQTGDSESVPDPQPLGEPPAAPSGVGPNTMAAGGGAPMADNNEGADGVGSSSGNWHCDSTWLGDRVITTSTRTWALPTYNNHLYKQISNGTSGGATNDNTYFGYSTPWGYFDFNRFHCHFSPRDWQRLINNNWGFRPKRLSFKLFNIQVKEVTQNEGTKTIANNLTSTIQVFTDSEYQLPYVLGSAHQGCLPPFPADVFMIPQYGYLTLNNGSQAVGRSSFYCLEYFPSQMLRTGNNFTFSYTFEDVPFHSSYAHSQSLDRLMNPLIDQYLYYLSRTQTTGGTANTQTLGFSQGGPNTMANQAKNWLPGPCYRQQRVSTTTGQNNNSNFAWTAGTKYHLNGRNSLANPGIAMATHKDDEERFFPSNGILIFGKQNAARDNADYSDVMLTSEEEIKTTNPVATEEYGIVADNLQQQNTAPQIGTVNSQGALPGMVWQNRDVYLQGPIWAKIPHTDGNFHPSPLMGGFGLKHPPPQILIKNTPVPADPPTTFNQSKLYSFITQYSTGQVSVEIEWELQKENSKRWNPEIQYTSNYYKSTSVDFAVNTEGVYSEPRPIGTRYLTRNL

SEQ ID NO: 988 - DNA, 2208 bp, Artificial Sequence
  source: /note="Description of Artificial Sequence: Synthetic polynucleotide"
atggctgccgatggttatcttccagattggctcgaggacaacctctctgagggcattcgcgagtggtgggacttgaaacctggagccccgaaacccaaagccaaccagcaaaagcaggacgacggccggggtctggtgcttcctggctacaagtacctcggacccttcaacggactcgacaagggggagcccgtcaacgcggcggatgcagcggccctcgagcacgacaaagcctacgaccggcagctcgacagcggagacaacccgtacctcaagtacaaccacgccgacgcggagtttcaggagcgccttaaagaagatacgtcttttgggggcaacctcggacgagcagtcttccaggccaagaagagggttctcgaaccttttggtctggttgaggaaggtgctaagacggctcctggaaagaaacgtccggtagagcagtcgccacaagagccagactcctcctcgggcattggcaagacaggccagcagcccgctaaaaagagactcaattttggtcagactggcgactcagagtcagtccccgacccacaacctctcggagaacctccagcaacccccgctgctgtgggacctactacaatggcttcaggtggtggcgcaccagtggcagacaataacgaaggcgccgacggagtgggtagttcctcgggaaattggcattgcgattccacatggctgggcgacagagtcatcaccaccagcacccgaacatgggccttgcccacctataacaaccacctctacaagcaaatctccagtgcttcgacgggggccagcaacgacaaccactacttcggctacagcaccccctgggggtattttgatttcaacaggttccactgccatttctcaccacgtgactggcagcgactcatcaacaacaattggggattccggcccaaaagactcaacttcaagctgttcaacatccaggtcaaggaagtcacgacgaacgaaggcaccaagaccatcgccaataatctcaccagcaccgtgcaggtctttacggactcggagtaccagttaccgtacgtgctaggatccgctcaccagggatgtctgcctccgttcccggcggacgtcttcatggttcctcagtacggctatttaactttaaacaatggaagccaagccctgggacgttcctccttctactgtctggagtatttcccatcgcagatgctgagaacgggcaacaactttacctttagctacaccttcgaggacgtgcctttccacagcagctacgcgcacagccagagcctggacaggctgatgaatcccctcatcgaccagtacctgtactacctggtcagaacgcaaacgactggaactggagggacgcagactctggcattcagccaagcgggtcctagctcaatggccaaccaggctagaaattgggtgcccggaccttgctaccggcagcagcgcgtctccacgacaaccaaccagaacaacaacagcaactttgcctggacgggagctgccaagtttaagctgaacggccgagactctctaatgaatccgggcgtggcaatggcttcccacaaggatgacgacgaccgcttcttcccttcgagcggggtcctgatttttggcaagcaaggagccgggaacgatggagtggattacagccaagtgctgattacagatgaggaagaaatcaaggctaccaaccccgtggccacagaagaatatggagcagtggccatcaacaaccaggccgccaatacgcaggcgcagaccggactcgtgcacaaccagggggtgattcccggcatggtgtggcagaatagagacgtgtacctgcagggtcccatctgggccaaaattcctcacacggacggcaactttcacccgtctcccctgatgggcggctttggactgaagcacccgcctcctcaaattctcatcaagaacacaccggttccagcggacccgccgcttaccttcaaccaggccaagctgaactctttcatcacgcagtacagcaccggacaggtcagcgtggaaatcgagtgggagctgcagaaagaaaacagcaaacgctggaatccagagattcaatacacttccaactactacaaatctacaaatgtggactttgctgtcaacacggagggggtttatagcgagcctcgccccattggcacccgttacctcacccgcaacctgtaa

SEQ ID NO: 989 - DNA, 2211 bp, Artificial Sequence
  source: /note="Description of Artificial Sequence: Synthetic polynucleotide"
  modified_base (337)..(337): a, c, t, or g
atggctgccgatggttatcttccagattggctcgaggacactctctctgaaggaataagacagtggtggaagctcaaacctggcccaccaccaccaaagcccgcagagcggcataaggacgacagcaggggtcttgtgcttcctggctacaagtacctcggacccttcaacggactcgacaagggggagcccgtcaacgcggcggacgcagcgaccctcgagcacgacaaggcctacgaccagcagctcaaagcgggtgacaatccgtacctgcggtataaccacgccgacgccgagtttcaggagcgtctgcaagaagatacgtcttttgggggcnacctcgggcgagcagtcttccaggccaagaagcgggttctcgaacctctcggtctggttgaggaagctgctaagacggctcctggaaagaagagaccagtagagccatcaccccagcgttctccagactcctctacgggcatcggcaagaaaggccaacagcccgccagaaaaagactcaattttggtcagactggcgactcagagtcagttccagaccctcaacctctcggagaacctccagcagcgccctctggtgtgggacctaatacaatggctgcaggcggtggcgcaccaatggcagacaataacgaaggcgccgacggagtgggtagttcctcgggaaattggcattgcgattccacatggctgggcgacagagtcatcaccaccagcacccgaacctgggccctgcccacctacaacaaccacctctacaagcaaatctccagtgcttcaacgggggccagcaacgacaaccactacttcggctacagcaccccctgggggtattttgatttcaacagattccactgccatttctcaccacgtgactggcagcgactcatcaacaacaattggggattccggcccaagagactcaacttcaagctcttcaacatccaagtcaaggaggtcacgacgaatgatggcgtcacgaccatcgctaataaccttaccagcacggttcaagtcttctcggactcagactatcagctcccgtacgtgctcgggtcggctcacgagggctgcctcccgccgttcccagcggacgttttcatgattcctcagtacggctatttaactttaaacaatggaagccaagccctgggacgttcctccttctactgtctggagtatttcccatcgcagatgctgagaaccggcaacaactttcagttcagctacaccttcgaggacgtgcctttccacagcagctacgcgcacagccagagcctggacaggctgatgaatcccctcatcgaccagtacctgtactacctggtcagaacgcaaacgactggaactggagggacgcagactctggcattcagccaagcgggtcctagctcaatggccaaccaggctagaaattgggtgcccggaccttgctaccggcagcagcgcgtctccacgacaaccaaccagaacaacaacagcaactttgcctggacgggagctgccaagtttaagctgaacggccgagactctctaatgaatccgggcgtggcaatggcttcccacaaggatgacgacgaccgcttcttcccttcgagcggggtcctgatttttggcaagcaaggagccgggaacgatggagtggattacagccaagtgctgattacagatgaggaagaaatcaaggctaccaaccccgtagccacagaagaatatggagcagtggccatcaacaaccaggccgccaatacgcaggcgcagaccggactcgtgcacaaccagggggtgattcccggaatggtgtggcaagacagagacgtatacctgcagggtcctatttgggccaaaattcctcacacggatggacactttcacccgtctcctctcatgggcggctttggacttaagcacccgcctcctcagatcctcatcaaaaacacgcctgttcctgcgaatcctccggcagagttttcggctacaaagtttgcttcattcatcacccagtattccacaggacaagtgagcgtggagattgaatgggagctgcagaaagaaaacagcaaacgctggaatcccgaagtgcagtatacatctaactatgcaaaatctgccaacgttgatttcactgtggacaacaatggactttatactgagcctcgccccattggcacccgttacctcacccgtcccctgtaa

SEQ ID NO: 990 - DNA, 2214 bp, Artificial Sequence
  source: /note="Description of Artificial Sequence: Synthetic polynucleotide"
  modified_base (335)..(335): a, c, t, or g
atgactgacggttaccttccagattggctagaggacaacctctctgaaggcgttcgagagtggtgggcgctgcaacctggagccccgaagcccaaagccaaccagcaaaagcaggacgacggccggggtctggtgcttcctggctacaagtacctcggacccttcaacggactcgacaagggggagcccgtcaacgcggcggacgcagcggccctcgagcacgacaaggcctacgaccagcagctcaaagcgggtgacaatccgtacctgcggtataaccacgccgacgccgagtttcaggagcgtctgcaagaagatacgtcttttgggggcancctcgggcgagcagtcttccaggccaagaagcgggttctcgaacctctcggtctggttgaggaaggcgctaagacggctcctggaaagaaacgtccggtagagccatcaccccagcgttctccagactcctctacgggcatcggcaagaaaggccaacagcccgccagaaaaagactcaattttggtcagactggcgactcagagtcagttccagaccctcaacctctcggagaacctccagcagcgccctcaggtgtgggatctcttacaatggcttcaggtggtggcgcaccagtggcagacaataacgaaggtgccgatggagtgggtagttcctcgggaaattggcattgcgattcccaatggctgggggacagagtcatcaccaccagcacccgaacctgggccctgcccacctacaacaatcacctctacaagcaaatctccaacagcacatctggaggatcttcaaatgacaacgcctacttcggctacagcaccccctgggggtattttgacttcaacagattccactgccacttctcaccacgtgactggcagcgactcatcaacaacaactggggattccggcccaagagactcagcttcaagctcttcaacatccaggtcaaggaggtcacgcagaatgaaggcaccaagaccatcgccaataacctcaccagcaccatccaggtgtttacggactcggagtaccagctgccgtacgttctcggctctgcccaccagggctgcctgcctccgttcccggcggacgtgttcatgattccccagtacggctacctaacactcaacaacggtagtcaggccgtgggacgctcctccttctactgcctggaatactttccttcgcagatgctgagaaccggcaacaacttccagtttacttacaccttcgaggacgtgcctttccacagcagctacgcccacagccagagcttggaccggctgatgaatcctctgattgaccagtacctgtactacttgtctcggactcaaacaacaggaggcacggcaaatacgcagactctgggcttcagccaaggtgggcctaatacaatggccaatcaggcaaagaactggctgccaggaccctgttaccgccaacaacgcgtctcaacgacaaccgggcaaaacaacaatagcaactttgcctggactgctgggaccaaataccatctgaatggaagaaattcattggctaatcctggcatcgctatggcaacacacaaagacgacgaggagcgtttttttcccagtaacgggatcctgatttttggcaaacaaaatgctgccagagacaatgcggattacagcgatgtcatgctcaccagcgaggaagaaatcaaaaccactaaccctgtggctacagaggaatacggtatcgtggcagataacttgcagcagcaaaacacggctcctcaaattggaactgtcaacagccagggggccttacccggtatggtctggcagaaccgggacgtgtacctgcagggtcccatctgggccaagattcctcacacggacggcaacttccacccgtctccgctgatgggcggctttggcctgaaacatcctccgcctcagatcctgatcaagaacacgcctgtacctgcggatcctccgaccaccttaaaccaggccaagctgaactctttcatcacgcaatacagcaccggacaggtcagcgtggaaattgaatgggagctgcagaaggaaaacagcaagcgctggaacccagagattcagtacacttcaaactactacaaatctacaaatgtggactttgctgtcaatacagagggaacttatagtgaaccccgccccattggcaccagatttctgactcgtaatctgtaa

SEQ ID NO: 991 - DNA, 2211 bp, Artificial Sequence
  source: /note="Description of Artificial Sequence: Synthetic polynucleotide"
  modified_base (338)..(338): a, c, t, or g
atggctgccgatggttatcttccagattggctcgaggacactctctctgaaggaataagacagtggtggaagctcaaacctggcccaccaccaccaaagcccgcagagcggcataaggacgacagcaggggtcttgtgcttcctgggtacaagtacctcggccccttcaacggactcgacaagggggagcccgtcaacgcggcggacgcagcggccctcgagcacgacaaggcctacgaccagcagctcgaagcgggtgacaatccgtacctgcggtataaccacgccgacgccgagtttcaggagcgtctgcaagaagatacgtcttttgggggcancctcgggcgagcagtcttccaggccaagaagcgggttctcgaacctctcggtctggttgaggaaggcgctaagacggctcctggaaagaagagaccagtagagcagtcaccccaagaaccagactcctcctcgggcatcggcaggaaaggccaacagcccgccagaaaaagactcaattttggccagactggcgactcagagtcagttccagaccctcaacctctcggagaacctccagcagcgccctctggtgtgggacctaatacaatggcttcaggcggtggcgctccaatggcagacaataacgaaggcgccgacggagtgggtaatgcctcaggaaattggcattgcgattccacatggctgggcgacagagtcatcaccaccagcacccgcacctgggccttgcccacctacaataaccacctctacaagcaaatctccagtgcttcaacgggggccagcaacgacaaccactacttcggctacagcaccccctgggggtattttgatttcaacagattccactgccacttttcaccacgtgactggcagcgactcatcaacaacaattggggattccggcccaagagactcaacttcaaactcttcaacatccaggtcaaggaggtcacgcagaatgaaggcactaagaccatcgccaataaccttaccagcacgattcaggtatttacggactcggaataccagctgccgtacgtcctcggctccgcgcaccagggctgcctgcctccgttcccggcggacgtcttcatgattccccagtacggctaccttacactgaacaatggaagtcaagccgtaggccgttcctccttctactgcctggaatattttccatctcaaatgctgcgaactggcaacaacttccagtttacctacaccttcgaggacgtgcctttccacagcagctacgcccacagccagagcttggaccggctgatgaatcctctgattgaccagtacctgtactacttgtctcggactcagtccacaggaggaactcaaggtacccagcaattgttattttctcaagctgggcctgcaaacatgtcggctcaggctaagaactggctacctggaccttgctaccggcagcagcgagtctctacgacactgtcgcaaaacaacaacagcaactttgcttggactggtgccaccaaatatcacctgaacggaagagactctttggtaaatcccggtgtcgccatggcaacccacaaggacgacgaggaacgcttcttcccgtcgagtggagtcctgatgtttggaaaacagggtgctggaagagacaatgtggactacagcagcgttatgctaaccagcgaagaagaaattaaaaccactaaccctgtagccacagaacaatacggtgtggtggttgataacttgcagcaaaccaatacggggcctattgtgggaaatgtcaacagccaaggagccttacctggtatggtctggcagaaccgggacgtgtacctgcagggtcccatctgggccaagattcctcacacggacggcaacttccacccgtctccgctgatgggcggctttggcctgaaacatcctccgcctcagatcctcatcaaaaacacacctgtacctgcggatcctccaacggccttcaacaaggacaagctgaactctttcatcacccagtattctactggccaagtcagcgtggagatcgagtgggagctgcagaaggaaaacagcaagcgctggaacccggagatccagtacacttccaactattacaagtctaataatgttgaatttgctgttaatactgaaggtgtatatagtgaaccccgccccattggcaccagatacctgactcgtaatctgtaa

SEQ ID NO: 992 - protein, 735 aa, Artificial Sequence
  source: /note="Description of Artificial Sequence: Synthetic polypeptide"
MAADGYLPDWLEDNLSEGIREWWDLKPGAPKPKANQQKQDDGRGLVLPGYKYLGPFNGLDKGEPVNAADAAALEHDKAYDRQLDSGDNPYLKYNHADAEFQERLKEDTSFGGNLGRAVFQAKKRVLEPFGLVEEGAKTAPGKKRPVEQSPQEPDSSSGIGKTGQQPAKKRLNFGQTGDSESVPDPQPLGEPPATPAAVGPTTMASGGGAPVADNNEGADGVGSSSGNWHCDSTWLGDRVITTSTRTWALPTYNNHLYKQISSASTGASNDNHYFGYSTPWGYFDFNRFHCHFSPRDWQRLINNNWGFRPKRLNFKLFNIQVKEVTTNEGTKTIANNLTSTVQVFTDSEYQLPYVLGSAHQGCLPPFPADVFMVPQYGYLTLNNGSQALGRSSFYCLEYFPSQMLRTGNNFTFSYTFEDVPFHSSYAHSQSLDRLMNPLIDQYLYYLVRTQTTGTGGTQTLAFSQAGPSSMANQARNWVPGPCYRQQRVSTTTNQNNNSNFAWTGAAKFKLNGRDSLMNPGVAMASHKDDDDRFFPSSGVLIFGKQGAGNDGVDYSQVLITDEEEIKATNPVATEEYGAVAINNQAANTQAQTGLVHNQGVIPGMVWQNRDVYLQGPIWAKIPHTDGNFHPSPLMGGFGLKHPPPQILIKNTPVPADPPLTFNQAKLNSFITQYSTGQVSVEIEWELQKENSKRWNPEIQYTSNYYKSTNVDFAVNTEGVYSEPRPIGTRYLTRNL

SEQ ID NO: 993 - protein, 736 aa, Artificial Sequence
  source: /note="Description of Artificial Sequence: Synthetic polypeptide"
  MOD_RES (113)..(113): Any naturally occurring amino acid
MAADGYLPDWLEDTLSEGIRQWWKLKPGPPPPKPAERHKDDSRGLVLPGYKYLGPFNGLDKGEPVNAADAATLEHDKAYDQQLKAGDNPYLRYNHADAEFQERLQEDTSFGGXLGRAVFQAKKRVLEPLGLVEEAAKTAPGKKRPVEPSPQRSPDSSTGIGKKGQQPARKRLNFGQTGDSESVPDPQPLGEPPAAPSGVGPNTMAAGGGAPMADNNEGADGVGSSSGNWHCDSTWLGDRVITTSTRTWALPTYNNHLYKQISSASTGASNDNHYFGYSTPWGYFDFNRFHCHFSPRDWQRLINNNWGFRPKRLNFKLFNIQVKEVTTNDGVTTIANNLTSTVQVFSDSDYQLPYVLGSAHEGCLPPFPADVFMIPQYGYLTLNNGSQALGRSSFYCLEYFPSQMLRTGNNFQFSYTFEDVPFHSSYAHSQSLDRLMNPLIDQYLYYLVRTQTTGTGGTQTLAFSQAGPSSMANQARNWVPGPCYRQQRVSTTTNQNNNSNFAWTGAAKFKLNGRDSLMNPGVAMASHKDDDDRFFPSSGVLIFGKQGAGNDGVDYSQVLITDEEEIKATNPVATEEYGAVAINNQAANTQAQTGLVHNQGVIPGMVWQDRDVYLQGPIWAKIPHTDGHFHPSPLMGGFGLKHPPPQILIKNTPVPANPPAEFSATKFASFITQYSTGQVSVEIEWELQKENSKRWNPEVQYTSNYAKSANVDFTVDNNGLYTEPRPIGTRYLTRPL

SEQ ID NO: 994 - protein, 737 aa, Artificial Sequence
  source: /note="Description of Artificial Sequence: Synthetic polypeptide"
  MOD_RES (112)..(112): Any naturally occurring amino acid
MTDGYLPDWLEDNLSEGVREWWALQPGAPKPKANQQKQDDGRGLVLPGYKYLGPFNGLDKGEPVNAADAAALEHDKAYDQQLKAGDNPYLRYNHADAEFQERLQEDTSFGGXLGRAVFQAKKRVLEPLGLVEEGAKTAPGKKRPVEPSPQRSPDSSTGIGKKGQQPARKRLNFGQTGDSESVPDPQPLGEPPAAPSGVGSLTMASGGGAPVADNNEGADGVGSSSGNWHCDSQWLGDRVITTSTRTWALPTYNNHLYKQISNSTSGGSSNDNAYFGYSTPWGYFDFNRFHCHFSPRDWQRLINNNWGFRPKRLSFKLFNIQVKEVTQNEGTKTIANNLTSTIQVFTDSEYQLPYVLGSAHQGCLPPFPADVFMIPQYGYLTLNNGSQAVGRSSFYCLEYFPSQMLRTGNNFQFTYTFEDVPFHSSYAHSQSLDRLMNPLIDQYLYYLSRTQTTGGTANTQTLGFSQGGPNTMANQAKNWLPGPCYRQQRVSTTTGQNNNSNFAWTAGTKYHLNGRNSLANPGIAMATHKDDEERFFPSNGILIFGKQNAARDNADYSDVMLTSEEEIKTTNPVATEEYGIVADNLQQQNTAPQIGTVNSQGALPGMVWQNRDVYLQGPIWAKIPHTDGNFHPSPLMGGFGLKHPPPQILIKNTPVPADPPTTLNQAKLNSFITQYSTGQVSVEIEWELQKENSKRWNPEIQYTSNYYKSTNVDFAVNTEGTYSEPRPIGTRFLTRNL

SEQ ID NO: 995 - protein, 736 aa, Artificial Sequence
  source: /note="Description of Artificial Sequence: Synthetic polypeptide"
  MOD_RES (113)..(113): Any naturally occurring amino acid
MAADGYLPDWLEDTLSEGIRQWWKLKPGPPPPKPAERHKDDSRGLVLPGYKYLGPFNGLDKGEPVNAADAAALEHDKAYDQQLEAGDNPYLRYNHADAEFQERLQEDTSFGGXLGRAVFQAKKRVLEPLGLVEEGAKTAPGKKRPVEQSPQEPDSSSGIGRKGQQPARKRLNFGQTGDSESVPDPQPLGEPPAAPSGVGPNTMASGGGAPMADNNEGADGVGNASGNWHCDSTWLGDRVITTSTRTWALPTYNNHLYKQISSASTGASNDNHYFGYSTPWGYFDFNRFHCHFSPRDWQRLINNNWGFRPKRLNFKLFNIQVKEVTQNEGTKTIANNLTSTIQVFTDSEYQLPYVLGSAHQGCLPPFPADVFMIPQYGYLTLNNGSQAVGRSSFYCLEYFPSQMLRTGNNFQFTYTFEDVPFHSSYAHSQSLDRLMNPLIDQYLYYLSRTQSTGGTQGTQQLLFSQAGPANMSAQAKNWLPGPCYRQQRVSTTLSQNNNSNFAWTGATKYHLNGRDSLVNPGVAMATHKDDEERFFPSSGVLMFGKQGAGRDNVDYSSVMLTSEEEIKTTNPVATEQYGVVVDNLQQTNTGPIVGNVNSQGALPGMVWQNRDVYLQGPIWAKIPHTDGNFHPSPLMGGFGLKHPPPQILIKNTPVPADPPTAFNKDKLNSFITQYSTGQVSVEIEWELQKENSKRWNPEIQYTSNYYKSNNVEFAVNTEGVYSEPRPIGTRYLTRNL

SEQ ID NO: 996 - DNA, 2211 bp, Artificial Sequence
  source: /note="Description of Artificial Sequence: Synthetic AAV9 VP1"
atggccgccgacggctacctgcccgactggctggaggacaacctgagcgagggcatccgcgagtggtgggccctgaagcccggcgccccccagcccaaggccaaccagcagcaccaggacaacgcccgcggcctggtgctgcccggctacaagtacctgggccccggcaacggcctggacaagggcgagcccgtgaacgccgccgacgccgccgccctggagcacgacaaggcctacgaccagcagctgaaggccggcgacaacccctacctgaagtacaaccacgccgacgccgagttccaggagcgcctgaaggaggacaccagcttcggcggcaacctgggccgcgccgtgttccaggccaagaagcgcctgctggagcccctgggcctggtggaggaggccgccaagaccgcccccggcaagaagcgccccgtggagcagagcccccaggagcccgacagcagcgccggcatcggcaagagcggcgcccagcccgccaagaagcgcctgaacttcggccagaccggcgacaccgagagcgtgcccgacccccagcccatcggcgagccccccgccgcccccagcggcgtgggcagcctgaccatggccagcggcggcggcgcccccgtggccgacaacaacgagggcgccgacggcgtgggcagcagcagcggcaactggcactgcgacagccagtggctgggcgaccgcgtgatcaccaccagcacccgcacctgggccctgcccacctacaacaaccacctgtacaagcagatcagcaacagcaccagcggcggcagcagcaacgacaacgcctacttcggctacagcaccccctggggctacttcgacttcaaccgcttccactgccacttcagcccccgcgactggcagcgcctgatcaacaacaactggggcttccgccccaagcgcctgaacttcaagctgttcaacatccaggtgaaggaggtgaccgacaacaacggcgtgaagaccatcgccaacaacctgaccagcaccgtgcaggtgttcaccgacagcgactaccagctgccctacgtgctgggcagcgcccacgagggctgcctgccccccttccccgccgacgtgttcatgatcccccagtacggctacctgaccctgaacgacggcagccaggccgtgggccgcagcagcttctactgcctggagtacttccccagccagatgctgcgcaccggcaacaacttccagttcagctacgagttcgagaacgtgcccttccacagcagctacgcccacagccagagcctggaccgcctgatgaaccccctgatcgaccagtacctgtactacctgagcaagaccatcaacggcagcggccagaaccagcagaccctgaagttcagcgtggccggccccagcaacatggccgtgcagggccgcaactacatccccggccccagctaccgccagcagcgcgtgagcaccaccgtgacccagaacaacaacagcgagttcgcctggcccggcgccagcagctgggccctgaacggccgcaacagcctgatgaaccccggccccgccatggccagccacaaggagggcgaggaccgcttcttccccctgagcggcagcctgatcttcggcaagcagggcaccggccgcgacaacgtggacgccgacaaggtgatgatcaccaacgaggaggagatcaagaccaccaaccccgtggccaccgagagctacggccaggtggccaccaaccaccagagcgcccaggcccaggcccagaccggctgggtgcagaaccagggcatcctgcccggcatggtgtggcaggaccgcgacgtgtacctgcagggccccatctgggccaagatcccccacaccgacggcaacttccaccccagccccctgatgggcggcttcggcatgaagcacccccccccccagatcctgatcaagaacacccccgtgcccgccgacccccccaccgccttcaacaaggacaagctgaacagcttcatcacccagtacagcaccggccaggtgagcgtggagatcgagtgggagctgcagaaggagaacagcaagcgctggaaccccgagatccagtacaccagcaactactacaagagcaacaacgtggagttcgccgtgaacaccgagggcgtgtacagcgagccccgccccatcggcacccgctacctgacccgcaacctgtaa

SEQ ID NO: 997 - DNA, 2211 bp, Artificial Sequence
  source: /note="Description of Artificial Sequence: Synthetic polynucleotide"
atggctgccgatggttatcttccagattggctcgaggacactctctctgaaggaataagacagtggtggaagctcaaacctggcccaccaccaccaaagcccgcagagcggcataaggacgacagcaggggtcttgtgcttcctgggtacaagtacctcggacccttcaacggactcgacaagggagagccggtcaacgaggcagacgccgcggccctcgagcacgacaaggcctacgaccagcagctcaaggccggagacaacccgtacctcaagtacaaccacgccgacgccgagttccaggagcggctcaaagaagatacgtcttttgggggcaacctcggacgagcagtcttccaggccaagaagcgggttctcgaacctctcggtctggttgaggaaggcgctaagacggctcctggaaagaaacgtccggtagagcagtcgccacaagagccagactcctcctcgggcattggcaagacaggccagcagcccgctaaaaagagactcaattttggtcagactggcgactcagagtcagtccccgacccacaacctctcggagaacctccagcaacccccgctgctgtgggacctactacaatggcttcaggcggtggcgcaccaatggcggacaataacgaaggcgccgatggagtgggtagttcctcgggaaattggcattgcgattcccaatggctgggggacagagtcatcaccaccagcacccgaacatgggccttgcccacctataacaaccacctctacaagcaaatctccagtgcttcaacgggggccagcaacgacaaccactacttcggctacagcaccccctgggggtattttgacttcaacagattccactgccacttctcaccacgtgactggcagcgactcatcaacaacaactggggattccgacccaagagactcaacttcaagctctttaacattcaagtcaaggaggtcacgcagaatgaaggcaccaagaccatcgccaataacctcaccagcaccatccaggtgtttacggactcggagtaccagctgccgtacgttctcggctccgcccaccagggctgcctgcctccgttcccggcggacgtgttcatgattccccagtacggctacctaacactcaacaacggtagtcaggccgtgggacgctcctccttctactgcctggaatactttccttcgcagatgctgagaaccggcaacaacttccagtttacttacaccttcgaggacgtgcctttccacagcagctacgcccacagccagagcttggaccggctgatgaatcctctgattgaccagtacctgtactacttgtctcggactcaaacaacaggaggcacggcaaatacgcagactctgggcttcagccaaggtgggcctaatacaatggccaatcaggcaaagaactggctgccaggaccctgttaccgccaacaacgcgtctcaacgacaaccgggcaaaacaacaatagcaactttgcctggactgctgggaccaaataccatctgaatggaagaaattcattggctaatcctggcatcgctatggcaacacacaaagacgacaaggagcgtttttttcccagtaacgggatcctgatttttggcaaacaaaatgctgccagagacaatgcggattacagcgatgtcatgctcaccagcgaggaagaaatcaaaaccactaaccctgtggctacagaggaatacggtatcgtggcagataacttgcagcagcaaaacacggctcctcaaattggaactgtcaacagccagggggccttacccggtatggtctggcagaaccgggacgtgtacctgcagggtcccatctgggccaagattcctcacacggacggcaacttccacccgtctccgctgatgggcggctttggcctgaaacatcctccgcctcagatcctgatcaagaacacgcctgtacctgcggatcctccgaccaccttcaaccagtcaaagctgaactctttcatcacgcaatacagcaccggacaggtcagcgtggaaattgaatgggagctgcagaaagaaaacagcaaacgctggaacccagagattcaatacacttccaactactacaaatctacaagtgtggactttgctgttaatacagaaggcgtgtactctgaaccccaccccattggcacccgttacctcacccgtcccctgtaa

SEQ ID NO: 998 - DNA, 2211 bp, Artificial Sequence
  source: /note="Description of Artificial Sequence: Synthetic polynucleotide"
atggctgccgatggttatcttccagattggctcgaggacaacctctctgagggcattcgcgagtggtgggcgctgaaacctggagccccgaagcccaaagccaaccagcaaaagcaggacgacggccggggtctggtgcttcctggctacaagtacctcggacccttcaacggactcgacaagggggagccggtcaacgcagcagacgcggcggccctcgagcacgacaaggcctacgaccagcagctcaaggccggagacaacccgtacctcaagtacaaccacgccgacgccgagttccaggagcggctcaaagaagatacgtcttttgggggcaacctcgggcgagcagtcttccaggccaaaaagaggcttcttgaacctcttggtctggttgaggaagcggctaagacggctcctggaaagaagaggcctgtagagcagtctcctcaggaaccggactcctccgcgggtattggcaaatcgggtgcacagcccgctaaaaagagactcaattttggtcagactggcgactcagagtcagtccccgacccacaacctctcggagaacctccagcaacccccgctgctgtgggacctactacaatggcttcaggcggtggcgcaccaatggcagacaataacgaaggcgccgacggagtgggtaatgcctcaggaaattggcattgcgattccacatggctgggcgacagagtcatcaccaccagcacccgaacctgggccctgcccacctacaataaccacctctacaagcaaatctccagtgcttcaacgggggccagcaacgacaaccactacttcggctacagcaccccctgggggtattttgatttcaacagattccactgccacttttcaccacgtgactggcagcgactcatcaacaacaattggggattccggcccaagagactcaacttcaaactcttcaacatccaagtcaaggaggtcacgcagaatgaaggcaccaagaccatcgccaataacctcaccagcaccatccaggtgtttacggactcggagtaccagctgccgtacgttctcggctctgcccaccagggctgcctgcctccgttcccggcggacgtgttcatgattccccagtacggctacctaacactcaacaacggtagtcaggccgtgggacgctcctccttctactgcctggaatactttccttcgcagatgctgagaaccggcaacaacttccagtttacttacaccttcgaggacgtgcctttccacagcagctacgcccacagccagagcttggaccggctgatgaatcctctgattgaccagtacctgtactacttgtctcggactcaaacaacaggaggcacggcaaatacgcagactctgggcttcagccaaggtgggcctaatacaatggccaatcaggcaaagaactggctgccaggaccctgttaccgccaacaacgcgtctcaacgacaaccgggcaaaacaacaatagcaactttgcctggactgctgggaccaaataccatctgaatggaagaaattcattggctaatcctggcatcgctatggcaacacacaaagacgacaaggagcgtttttttcccagtaacgggatcctgatttttggcaaacaaaatgctgccagagacaatgcggattacagcgatgtcatgctcaccagcgaggaagaaatcaaagccactaaccctgtggctacagaggaatacggtatcgtggcagataacttgcagcagcaaaacacggctcctcaaattggaactgtcaacagccagggggccttacccggtatggtttggcagaaccgggacgtgtacctgcagggtcccatctgggccaagattcctcacacggacggcaacttccacccgtctccgctgatgggcggctttggcctgaaacatcctccgcctcagatcctgatcaagaacacgcctgtacctgcggatcctccgaccaccttcaaccagtcaaagctgaactctttcatcacgcaatacagcaccggacaggtcagcgtggaaattgaatgggagctgcagaaggaaaacagcaagcgctggaaccccgagatccagtacacctccaactactacaaatctacaagtgtggactttgctgttaatacagaaggcgtgtactctgaaccccaccccattggcacccgttacctcacccgtcccctgtaa

SEQ ID NO: 999 - DNA, 2214 bp, Artificial Sequence
  source: /note="Description of Artificial Sequence: Synthetic polynucleotide"
atggctgccgatggttatcttccagattggctcgaggacaacctctctgagggcattcgcgagtggtgggacttgaaacctggagccccgaagcccaaagccaaccagcaaaagcaggacgacggccggggtctggtgcttcctggctacaagtacctcggacccttcaacggactcgacaagggggagcccgtcaacgcggcggacgcagcggccctcgagcacgacaaggcctacgaccagcagctcaaagcgggtgacaatccgtacctgcggtataaccacgccgacgccgagtttcaggagcgtctgcaagaagatacgtcttttgggggcaacctcgggcgagcagtcttccaggccaagaagcgggttctcgaacctctcggtctggttgaggaaggcgctaatacggctcctggaaagaaacgtccggtagagcagtcgccacaagagccagactcctccgcgggtattggcaaatcgggtgcacagcccgctaaaaagagactcaatttcggtcagactggcgacacagagtcagtcccagaccctcaaccaatcggagaacctcccgcagccccctcaggtgtgggatctcttacaatggcttcaggtggtggcgcaccagtggcagacaataacgaaggtgccgatggagtgggtagttcctcgggaaattggcattgcgattcccaatggctgggggacagagtcatcaccaccagcacccgaacctgggccctgcccacctacaacaatcacctctacaagcaaatctccaacagcacatctggaggatcttcaaatgacaacgcctacttcggctacagcaccccctgggggtattttgacttcaacagattccactgccacttctcaccacgtgactggcagcgactcatcaacaacaactggggattccggcctaagcgactcaacttcaagctcttcaacattcaggtcaaagaggttacggacaacaatggagtcaagaccatcgccaataacctcaccagcaccatccaggtgtttacggactcggagtaccagctgccgtacgttctcggctccgcccaccagggctgcctgcctccgttcccggcggacgtgttcatgattccccagtacggctacctaacactcaacaacggtagtcaggccgtgggacgctcctccttctactgcctggaatactttccttcgcagatgctgagaaccggcaacaacttccagtttacttacaccttcgaggacgtgcctttccacagcagctacgcccacagccagagcttggaccggctgatgaatcctctgattgaccagtacctgtactacttgtctcggactcaaacaacaggaggcacggcaaatacgcagactctgggcttcagccaaggtgggcctaatacaatggccaatcaggcaaagaactggctgccaggaccctgttaccgccaacaacgcgtctcaacgacaaccgggcaaaacaacaatagcaactttgcctggactgctgggaccaaataccatctgaatggaagaaattcattggctaatcctggcatcgctatggcctcacacaaagacgacaaggagcgtttttttcccagtaacgggatcctgatttttggcaaacaaaatgctgccagagacaatgcggattacagcgatgtcatgctcaccagcgaggaagaaatcaaaaccactaaccctgtggctacagaggaatacggtatcgtggcagataacttgcagcagcaaaacacggctcctcaaattggaactgtcaacagtcaaggagccttacctggcatggtctggcagaaccgggacgtgtacctgcagggtcccatctgggccaagattcctcacacggacggcaacttccacccgtctccgctgatgggcggctttggcctgaaacatcctccgcctcagatcctgatcaagaacacgcctgtacctgcggatcctccgaccaccttcaaccagtcaaagctgaactctttcatcacgcaatacagcaccggacaggtcagcgtggaaattgaatgggagctgcagaaggaaaacagcaagcgctggaaccccgagatccagtacaccaccaactactacaaatctacaagtgtggactttgctgttaatacagaaggcgtgtactctgaaccccaccccattggcacccgttacctcacccgtcccctgtaa

SEQ ID NO: 1000 - DNA, 2211 bp, Artificial Sequence
  source: /note="Description of Artificial Sequence: Synthetic polynucleotide"
atggctgccgatggttatcttccagattggctcgaggacaacctctctgagggcattcgcgagtggtgggcgctgaaacctggagccccgaagcccaaagccaaccagcaaaagcaggacgacggccggggtctggtgcttcctggctacaagtacctcggacccttcaacggactcgacaaaggagagccggtcaacgaggcggacgcggcagccctcgaacacgacaaagcttacgaccagcagctcaaggccggtgacaatccgtacctgcggtataaccacgccgacgccgagtttcaggagcgtcttcaagaagatacgtcttttgggggcaacctcgggcgagcagtcttccaggccaagaagcgggttctcgaacctctcggtctggttgaggaaggcgctaagacggctcctggaaagaaacgtccggtagagcagtcgccacaagagccagactcctcctcgggcatcggcaagacaggccagcagcccgctaaaaagagactcaattttggtcagactggcgactcagagtcagtccccgacccacaacctctcggagaacctccagcaacccccgctgctgtgggacctactacaatggcttcaggcggtggcgcaccaatggcagacaataacgaaggcgccgacggagtgggtaatgcctcaggaaattggcattgcgattccacatggctgggcgacagagtcatcaccaccagcacccgcacctgggccttgcccacctacaataaccacctctacaagcaaatctccagtgcttcaacgggggccagcaacgacaaccactacttcggctacagcaccccctgggggtattttgactttaacagattccactgccacttttcaccacgtgactggcaaagactcatcaacaacaactggggattccggcccaagagactcaacttcaagctcttcaacatccaggtcaaggaggtcacgcagaatgaaggcaccaagaccatcgccaataaccttaccagcacgattcaggtctttacggactcggaataccagctcccgtacgtcctcggctctgcgcaccagggctgcctccctccgttcccggcggacgtgttcatgattccgcagtacggctacctaacactcaacaacggtagtcaggccgtgggacgctcctccttctactgcctggaatactttccttcgcagatgctgagaaccggcaacaacttccagtttacttacaccttcgaggacgtgcctttccacagcagctacgcccacagccagagcttggaccggctgatgaatcctctgattgaccagtacctgtactacttgtctcggactcaaacaacaggaggcacggcaaatacgcagactctgggcttcagccaaggtgggcctaatacaatggccaatcaggcaaagaactggctgccaggaccctgttaccgccaacaacgcgtctcaacgacaaccgggcaaaacaacaatagcaactttgcctggactgctgggaccaaataccatctgaatggaagaaattcattggctaatcctggcatcgctatggcaacacacaaagacgacaaggagcgtttttttcccagtaacgggatcctgatttttggcaaacaaaatgctgccagagacaatgcggattacagcgatgtcatgctcaccagcgaggaagaaatcaaaaccactaaccctgtggctacagaggaatacggtatcgtggcagataacttgcagcagcaaaacacggctcctcaaattggaactgtcaacagccagggggccttacccggtatggtctggcagaaccgggacgtgtacctgcagggtcccatctgggccaagattcctcacacggacggcaacttccacccgtctccgctgatgggcggctttggcctgaaacatcctccgcctcagatcctgatcaagaacacgcctgtacctgcggatcctccgaccaccttcaaccagtcaaagctgaactctttcatcacgcaatacagcaccggacaggtcagcgtggaaattgaatgggagctgcagaaggaaaacagcaagcgctggaaccccgagatccagtacacctccaactactacaaatctacaagtgtggactttgctgttaatacagaaggcgtgtactctgaaccccaccccattggcacccgttacctcacccgtcccctgtaa

SEQ ID NO: 1001 - DNA, 2211 bp, Artificial Sequence
  source: /note="Description of Artificial Sequence: Synthetic polynucleotide"
atggctgccgatggttatcttccagattggctcgaggacaacctctctgagggcattcgcgagtggtgggcgctgaaacctggagccccgaagcccaaagccaaccagcaaaagcaggacgacggccggggtctggtgcttcctggctacaagtacctcggacccttcaacggactcgacaaaggagagccggtcaacgaggcggacgcggcagccctcgaacacgacaaagcttacgaccagcagctcaaagcgggtgacaatccgtacctgcggtataaccacgccgacgccgagtttcaggagcgtctgcaagaagatacgtcttttgggggcaacctcgggcgagcagtcttccaggccaagaagagggttctcgaaccttttggtctggttgaggaaggtgctaagacggctcctggaaagaaacgtccggtagagcagtcgccacaagagccagactcctcctcgggcattggcaagacaggccagcagcccgctaaaaagagactcaattttggtcagactggcgactcagagtcagtccccgacccacaacctctcggagaacctccagcaacccccgctgctgtgggacctactacaatggcttcaggcggtggcgcaccaatggcagacaataacgaaggcgccgacggagtgggtaatgcctcaggaaattggcattgcgattcccaatggctgggcgacagagtcatcaccaccagcaccagaacctgggccttgcccacctataacaaccacctctacaagcaaatctccagtgcttcaacgggggccagcaacgacaaccactacttcggctacagcaccccctgggggtattttgatttcaacagattccactgccacttctcaccacgtgactggcagcgactcatcaacaacaactggggattccggcctaagcgactcaacttcaagctcttcaacattcaggtcaaagaggttacggacaacaatggagtcaagaccatcgccaataaccttaccagcacggttcaagtcttctcggactcggagtaccagttgccgtacgtcctcggctctgcgcaccagggctgcctccctccgttcccggcggacgtgttcatgattccccagtacggctacctaacactcaacaacggtagtcaggccgtgggacgctcctccttctactgcctggaatactttccttcgcagatgctgagaaccggcaacaacttccagtttacttacaccttcgaggacgtgcctttccacagcagctacgcgcacagccagagcttggaccggctgatgaatcctctgattgaccagtacctgtactacttgtctcggactcaaacaacaggaggcacggcaaatacgcagactctgggcttcagccaaggtgggcctaatacaatggccaatcaggcaaagaactggctgccaggaccctgttaccgccaacaacgcgtctcaacgacaaccgggcaaaacaacaatagcaactttgcctggactgctgggaccaaataccatctgaatggaagaaattcattggctaatcctggcatcgctatggcaacacacaaagacgacaaggagcgtttttttcccagtaacgggatcctgatttttggcaaacaaaatgctgccagagacaatgcggattacagcgatgtcatgctcaccagcgaggaagaaatcaaaaccactaaccctgtggctacagaggaatacggtatcgtggcagataacttgcagcagcaaaacacggctcctcaaattggaactgtcaacagccagggggccttacccggtatggtctggcagaaccgggacgtgtacctgcagggtcccatctgggccaagattcctcacacggacggcaacttccacccgtctccgctgatgggcggctttggcctgaaacatcctccgcctcagatcctgatcaagaacacgcctgtacctgcggatcctccgaccaccttcaaccagtcaaagctgaactctttcatcacgcaatacagcaccggacaggtcagcgtggaaattgaatgggagctgcagaaggaaaacagcaagcgctggaaccccgagatccagtacacctccaactactacaaatctacaagtgtggactttgctgttaatacagaaggcgtgtactctgaaccccaccccattggcacccgttacctcacccgtcccctgtaa

SEQ ID NO: 1002 - DNA, 2244 bp, Artificial Sequence
  source: /note="Description of Artificial Sequence: Synthetic polynucleotide"
  modified_base (2241)..(2241): a, c, t, or g
atggctgccgatggttatcttccagattggctcgaggacactctctctgaaggaataagacagtggtggaagctcaaacctggcccaccaccaccaaagcccgcagagcggcataaggacgacagcaggggtcttgtgcttcctgggtacaagtacctcggacccttcaacggactcgacaagggagagccggtcaacgaggcagacgccgcggccctcgagcacgacaaagcctacgaccggcagctcgacagcggagacaacccgtacctcaagtacaaccacgccgacgcggagtttcaggagcgccttaaagaagatacgtcttttgggggcaacctcgggcgagcagtcttccaggccaagaagagggttctcgaaccttttggtctggttgaggaaggtgctaagacggctcctggaaagaaacgtccggtagagcagtcgccacaagagccagactcctcctcgggcattggcaagacaggccagcagcccgctaaaaagagactcaattttggtcagactggcgactcagagtcagtccccgacccacaacctctcggagaacctccagcaacccccgctgctgtgggacctactacaatggcttcaggcggtggcgcaccaatggcagacaataacgaaggcgccgacggagtgggtaatgcctcaggaaattggcattgcgattccacatggctgggcgacagagtcatcaccaccagcacccgaacatgggccttgcccacctataacaaccacctctacaagcaaatctccagtgcttcaacgggggccagcaacgacaaccactacttcggctacagcaccccctgggggtattttgacttcaacagattccactgccacttctcaccacgtgactggcagcgactcatcaacaacaactggggattccggcctaagcgactcaacttcaagctcttcaacattcaggtcaaagaggttacggacaacaatggagtcaagaccatcgccaataaccttaccagcacggtccaggtcttcacggactcagactatcagctcccgtacgtgctcgggtcggctcacgagggctgcctcccgccgttcccagcggacgttttcatgattcctcagtacggctacctaacactcaacaacggtagtcaggccgtgggacgctcctccttctactgcctggaatactttccttcgcagatgctgagaaccggcaacaacttccagtttacttacaccttcgaggacgtgcctttccacagcagctacgcgcacagccagagcttggaccggctgatgaatcctctgattgaccagtacctgtactacttgtctcggactcaaacaacaggaggcacggcaaatacgcagactctgggcttcagccaaggtgggcctaatacaatggccaatcaggcaaagaactggctgccaggaccctgttaccgccaacaacgcgtctcaacgacaaccgggcaaaacaacaatagcaactttgcctggactgctgggaccaaataccatctgaatggaagaaattcattggctaatcctggcatcgctatggcaacacacaaagacgacaaggagcgtttttttcccagtaacgggatcctgatttttggcaaacaaaatgctgccagagacaatgcggattacagcgatgtcatgctcaccagcgaggaagaaatcaaaaccactaaccctgtggctacagaggaatacggtatcgtggcagataacttgcagcagcaaaacacggctcctcaaattggaactgtcaacagccagggggccttacccggtatggtctggcagaaccgggacgtgtacctgcagggtcccatctgggccaagattcctcacacggacggcaacttccacccgtctccgctgatgggcggctttggcctgaaacatcctccgcctcagatcctgatcaagaacacgcctgtacctgcggatcctccgaccaccttcaaccagtcaaagctgaactctttcatcacgcaatacagcaccggacaggtcagcgtggaaattgaatgggagctgcagaaggaaaacagcaagcgctggaaccccgagatccagtacacctccaactactacaaatctacaagtgtggactttgctgttaatacagaaggcgtgtactctgaaccccaccccattggcaccagatacctgactcgtaatctgtaattgcttgttaatcaataaaccgtttaattnttt

SEQ ID NO: 1003 - DNA, 2217 bp, Artificial Sequence
  source: /note="Description of Artificial Sequence: Synthetic polynucleotide"
atggctgccgatggttatcttccagattggctcgaggacaacctctctgagggcattcgcgagtggtgggacttgaaacctggagccccgaaacccaaagccaaccagcaaaagcaggacgacggccggggtctggtgcttcctggctacaagtacctcggacccttcaacggactcgacaagggggagcccgtcaacgcggcggacgcagcggccctcgagcacgacaaggcctacgaccagcagctccaagcgggtgacaatccgtacctgcggtataaccacgccgacgccgagtttcaggagcgtctgcaagaagatacgtcttttgggggcaacctcggacgagcagtcttccaggcgaaaaagagggttctcgaacctctcggtctggttgaggaaggcgctaagacggctcctggaaagaagagaccggtagagccatcaccccagcgttctccagactcctctacgggcatcggcaagaaaggccaacagcccgccagaaaaagactcaattttggtcagactggcgactcagagtcagttccagaccctcaacctctcggagaacctccagcagcgccctctggtgtgggacctaatacaatggctgcaggcggtggcgcaccaatggcagacaataacgaaggcgccgacggagtgggtagttcctcgggaaattggcattgcgattcccaatggctgggggacagagtcatcaccaccagcacccgaacctgggccctgcccacctacaacaatcacctctacaagcaaatctccaacagcacatctggaggatcttcaaatgacaacgcctacttcggctacagcaccccctgggggtattttgacttcaaccgcttccactgccacttctcaccacgtgactggcagcgactcatcaacaacaactggggattccggcccaagagactcagcttcaaactcttcaacatccaggtcaaggaggtcacgcagaatgaaggcaccaagaccatcgccaataacctcaccagcaccatccaggtgtttacggactcggagtaccagctgccgtacgttctcggctctgcccaccagggctgcctgcctccgttcccggcggacgtgttcatgattcctcagtacggctacctaacgctcaacaatggcagccaggcagtgggacggtcatccttttactgcctggaatatttcccatcgcagatgctgagaacgggcaacaactttaccttcagctacacctttgaggacgttcctttccacagcagctacgctcacagccagagtctggaccgtctcatgaatcctctgattgaccagtacctgtactacttgtctcggactcaaacaacaggaggcacggcaaatacgcagactctgggcttcagccaaggtgggcctaatacaatggccaatcaggcaaagaactggctgccaggaccctgttaccgccaacaacgcgtctcaacgacaaccgggcaaaacaacaatagcaactttgcctggactgctgggaccaaataccatctgaatggaagaaattcattggctaatcctggcatcgctatggcaacacacaaagacgacaaggagcgtttttttcccagtaacgggatcctgatttttggcaaacaaaatgctgccagagacaatgcggattacagcgatgtcatgctcaccagcgaggaagaaatcaaaaccactaaccctgtggctacagaggaatacggtatcgtggcagataacttgcagcagcaaaacacggctcctcaaattggaactgtcaacagccagggggccttacccggtatggtctggcagaaccgggacgtgtacctgcagggtcccatctgggccaagattcctcacacggacggcaacttccacccgtctccgctgatgggcggctttggacttaagcacccgcctcctcagatcctcatcaaaaacacgcctgttcctgcggatcctccgaccaccttcaaccagtcaaagctgaactctttcatcacgcaatacagcaccggacaggtcagcgtggaaattgaatgggagctgcagaaggaaaacagcaagcgctggaaccccgagatccagtacacctccaactactacaaatctacaagtgtggactttgctgttaatacagaaggcgtgtactctgaaccccaccccattggcacccgttacctcacccgtcccctgtaa

SEQ ID NO: 1004 - DNA, 2214 bp, Artificial Sequence
  source: /note="Description of Artificial Sequence: Synthetic polynucleotide"
atggctgccgatggttatcttccagattggctcgaggacaacctctctgagggcattcgcgagtggtgggacttgaaacctggagccccgaagcccaaagccaaccagcaaaagcaggacgacggccggggtctggtgcttcctggctacaagtacctcggacccttcaacggactcgacaagggggagcccgtcaacgcggcggatgcagcggccctcgagcacgacaaagcctacgaccagcagctcaaagcgggtgacaatccgtacctgcggtataaccacgccgacgccgagtttcaggagcgtctgcaagaagatacgtcttttgggggcaacctcgggcgagcagtcttccaggccaagaagagggttctcgaaccttttggtctggttgaggaaggtgctaagacggctcctggaaagaaacgtccggtagagcagtcgccacaagagccagactcctcctcgggcattggcaagacaggccagcagcccgctaaaaagagactcaattttggtcagactggcgactcagagtcagtccccgacccacaacctctcggagaacctccagcaacccccgctgctgtgggacctactacaatggcttcaggcggtggcgcacccatgcaagacaataacgaaggcgccgacggagtgggtagttcctcgggaaattggcattgcgattccacatggctgggcgacagagtcatcaccaccagcacccgaacctgggccctgcccacctacaacaaccacctctacaagcaaatctccaacgggacatcgggaggagccaccaacgacaacacctacttcggctacagcaccccctgggggtattttgactttaacagattccactgccacttttcaccacgtgactggcagcgactcatcaacaacaactggggattccggcccaagagactcaacttcaagctcttcaacatccaggtcaaggaggtcacgcagaatgaaggcaccaagaccatcgccaataaccttaccagcacgattcaggtctttacggattcggaataccagctcccgtacgtcctcggctctgcgcaccagggctgcctccctccgttcccggcggacgtgttcatgattccgcagtacggctacctaacgctcaacaatggtagccaggcagtgggacggtcatccttttactgcctggaatatttcccatcgcagatgctgagaacgggcaacaactttaccttcagctacacctttgaggacgttcctttccacagcagctacgctcacagccagagtctggaccgtctcatgaatcctctgattgaccagtacctgtactacttgtctcggactcaaacaacaggaggcacggcaaatacgcagactctgggcttcagccaaggtgggcctaatacaatggccaatcaggcaaagaactggctgccaggaccctgttaccgccaacaacgcgtctcaacgacaaccgggcaaaacaacaatagcaactttgcctggactgctgggaccaaataccatctgaatggaagaaattcattggctaatcctggcatcgctatggcaacacacaaagacgacaaggagcgtttttttcccagtaacgggatcctgatttttggcaaacaaaatgctgccagagacaatgcggattacagcgatgtcatgctcaccagcgaggaagaaatcaaaaccactaaccctgtggctacagaggaatacggtatcgtggcagataacttgcagcagcaaaacacggctcctcaaattggaactgtcaacagccagggggccttacccggtatggtctggcagaaccgggacgtgtacctgcagggtcccatctgggccaagattcctcacacggacggcaacttccacccgtctccgctgatgggcggctttggcctgaaacatcctccgcctcagatcctgatcaagaacacgcctgtacctgcggatcctccgaccaccttcaaccagtcaaagctgaactctttcatcacgcaatacagcaccggacaggtcagcgtggaaattgaatgggagctgcagaaggaaaacagcaagcgctggaaccccgagatccagtacacctccaactactacaaatctacaagtgtggactttgctgttaatacagaaggcgtgtactctgaaccccaccccattggcacccgttacctcacccgtcccctgtaa

SEQ ID NO: 1005 - DNA, 2211 bp, Artificial Sequence
  source: /note="Description of Artificial Sequence: Synthetic polynucleotide"
atggctgccgatggttatcttccagattggctcgaggacaacctctctgagggcattcgcgagtggtgggcgctgaaacctggagccccgaagcccaaagccaaccagcaaaagcaggacgacggccggggtctggtgcttcctggctacaagtacctcggacccttcaacggactcgacaagggggagcccgtcaacgcggcggacgcagcggccctcgagcacgacaaggcctacgaccagcagctcaaagcgggtgacaatccgtacctgcggtataaccacgccgacgccgagtttcaggagcgtctgcaagaagatacgtcttttgggggcaacctcgggcgagcagtcttccaggccaagaagcgggttctcgaacctctcggtctggttgaggaaggcgctaagacggctcctggaaagaaacgtccggtagagcagtcgccacaagagccagactcctcctcgggcatcggcaagacaggccagcagcccgctaaaaagagactcaattttggtcagactggcgactcagagtcagtccccgacccacaacctctcggagaacctccagcaacccccgctgctgtgggacctactacaatggcttcaggcggtggcgcaccaatggcagacaataacgaaggcgccgacggagtgggtagttcctcgggaaattggcattgcgattccacatggctgggcgacagagtcatcaccaccagcacccgcacctgggccttgcccacctacaataaccacctctacaagcaaatctccagtgcttcaacgggggccagcaacgacaaccactacttcggctacagcaccccctgggggtattttgacttcaacagattccactgccacttctcaccacgtgactggcagcgactcatcaacaacaactggggattccggcctaagcgactcaacttcaagctcttcaacattcaggtcaaagaggttacggacaacaatggagtcaagaccatcgccaataaccttaccagcacggtccaggtcttcacggactcagactatcagctcccgtacgtgctcgggtcggctcacgagggctgcctcccgccgttcccagcggacgttttcatgattcctcagtacgggtatctgacgctcaacaatggcagccaggcagtgggacggtcatccttttactgcctggaatatttcccatcgcagatgctgagaacgggcaataactttaccttcagctacaccttcgaggacgtgcctttccacagcagctacgcgcacagccagagcctggaccggctgatgaatcctctgattgaccagtacctgtactacttgtctcggactcaaacaacaggaggcacggcaaatacgcagactctgggcttcagccaaggtgggcctaatacaatggccaatcaggcaaagaactggctgccaggaccctgttaccgccaacaacgcgtctcaacgacaaccgggcaaaacaacaatagcaactttgcctggactgctgggaccaaataccatctgaatggaagaaattcattggctaatcctggcatcgctatggcaacacacaaagacgacaaggagcgtttttttcccagtaacgggatcctgatttttggcaaacaaaatgctgccagagacaatgcggattacagcgatgtcatgctcaccagcgaggaagaaatcaaaaccactaaccctgtggctacagaggaatacggtatcgtggcagataacttgcagcagcaaaacacggctcctcaaattggaactgtcaacagccagggggccttacccggtatggtctggcagaaccgggacgtgtacctgcagggtcccatctgggccaagattcctcacacggacggcaacttccacccgtctccgctgatgggcggctttggcctgaaacatcctccgcctcagatcctgatcaagaacacgcctgtacctgcggatcctccgaccaccttcaaccagtcaaagctgaactctttcatcacgcaatacagcaccggacaggtcagcgtggaaattgaatgggagctgcagaaggaaaacagcaagcgctggaaccccgagatccagtacacctccaactactacaaatctacaagtgtggactttgctgttaatacagaaggcgtgtactctgaaccccaccccattggcacccgttacctcacccgtcccctgtaa

SEQ ID NO: 1006 - DNA, 2214 bp, Artificial Sequence
  source: /note="Description of Artificial Sequence: Synthetic polynucleotide"
atggctgccgatggttatcttccagattggctcgaggacaacctctctgagggcattcgcgagtggtgggacttgaaacctggagccccgaaacccaaagccaaccagcaaaagcaggacgacggccggggtctggtgcttcctggctacaagtacctcggacccttcaacggactcgacaagggggagcccgtcaacgcggcggatgcagcggccctcgagcacgacaaggcctacgaccagcagctcaaagcgggtgacaatccgtacctgcggtataaccacgccgacgccgagtttcaggagcgtctgcaagaagatacgtcttttgggggcaacctcgggcgagcagtcttccaggccaagaagcgggttctcgaacctctcggtctggttgaggaaggcgctaagacggctcctggaaagaagagaccggtagagccatcaccccagcgttctccagactcctctacgggcatcggcaagaaaggccaacagcccgccagaaaaagactcaattttggtcagactggcgactcagagtcagtccccgacccacaacctctcggagaacctccagcaacccccgctgctgtgggacctactacaatggcttcaggcggtggcgcaccaatggcagacaataacgaaggcgccgacggagtgggtaatgcctcaggaaattggcattgcgattccacatggctgggcgacagagtcatcaccaccagcacccgaacatgggccttgcccacctataacaaccacctctacaagcaaatctccagtgcttcaacgggggccagcaacgacaaccactacttcggctacagcaccccctgggggtattttgatttcaacagattccactgccatttctcaccacgtgactggcagcgactcatcaacaacaatttgggatcccggcccaagagactcaacttcaagctcttcatcatccaagtcaaggaggtcacgacgaatgatggcgtcacgaccatcgctaataaccttaccagcacggttcaagtcttctcggactcggagtaccagttgccgtacgtcctcggctctgcgcaccagggctgcctccctccgttcccggcggacgtgttcatgattccgcagtacggctacctaacgctcaacaatggcagccaggcagtgggacggtcatccttttactgcctggaatatttcccatcgcagatgctgagaacgggcaataactttaccttcagctacaccttcgaggacgtgcctttccacagcagctacgcgcacagccagagcctggaccggctgatgaatcctctcatcgaccagtacctgtattacctgaacagaactcagaatcagtccggaagtgcccaaaacaaggacttgctgtttagccgggggtctccagctggcatgtctgttcagcccaaaaactggctacctggaccctgttaccggcagcagcgcgtttctaaaacaaaaacagacaacaacaacagcaactttacctggactggtgcttcaaaatataaccttaatgggcgtgaatctataatcaaccctggcactgctatggcctcacacaaagacgacaaagacaagttctttcccatgagcggtgtcatgatttttggaaaggagagcgccggagcttcaaacactgcattggacaatgtcatgatcacagacgaagaggaaatcaaagccactaaccccgtggccaccgaaagatttgggactgtggcagtcaatctccagagcagcagcacagaccctgcgaccggagatgtgcatgttatgggagccttacctggaatggtgtggcaagacagagacgtatacctgcagggtcctatttgggccaaaattcctcacacggatggacactttcacccgtctcctctcatgggcggctttggacttaagcacccgcctcctcagatcctcatcaaaaacacgcctgttcctgcgaatcctccggcagagttttcggctacaaagtttgcttcattcatcacccagtattccacaggacaagtgagcgtggagattgaatgggagctgcagaaagaaaacagcaaacgctggaatcccgaagtgcagtatacatctaactatgcaaaatctgccaacgttgatttcactgtggacaacaatggactttatactgagcctcgccccattggcacccgttacctcacccgtcccctgtaa

SEQ ID NO: 1007 - DNA, 2211 bp, Artificial Sequence
  source: /note="Description of Artificial Sequence: Synthetic polynucleotide"
atggctgccgatggttatcttccagattggctcgaggacaacctctctgagggcattcgcgagtggtgggcgctgaaacctggagccccgaaacccaaagccaaccagcaaaagcaggacgacggccggggtctggtgcttcctggctacaagtacctcggacccttcaacggactcgacaagggggagcccgtcaacgcggcggacgcagcggccctcgagcacgacaaggcctacgaccagcagctcaaggcgggtgacaatccgtacctgcggtataaccacgccgacgccgagtttcaggagcgtctgcaagaagatacgtcttttgggggcaacctcgggcgagcagtcttccaggccaaaaagaggcttcttgaacctcttggtctggttgaggaagcggctaagacggctcctggaaagaaacgtccggtagagcagtcgccacaagagccagactcctcctcgggcattggcaagacaggccagcagcccgctaaaaagagactcaactttgggcagactggcgactcagagtcagtgcccgaccctcaaccaatcggagaacctccagcaacccccgctgctgtgggacctactacaatggcttcaggcggtggcgcaccaatggcggacaataacgaaggcgccgatggagtgggtaattcctcgggaaattggcattgcgattccacatggctgggcgacagagtcatcaccaccagcacccgaacctgggccctgcccacctacaacaatcacctctacaagcaaatctccagtgcttcaacgggggccagcaacgacaaccactacttcggctacagcaccccctgggggtattttgatttcaacagattccactgccacttttcaccacgtgactggcagcgactcatcaacaacaactggggattccggcccaagagactcaacttcaagctcttcaacatccaggtcaaggaggtcacgcagaatgaaggcaccaagaccatcgccaataacctcaccagcaccatccaggtgtttacggactcggagtaccagctgccgtacgttctcggctccgcccaccagggctgcctgcctccgttcccggcggacgtgttcatgattccgcagtacggctacctaacgctcaacaatggcagccaggcagtgggacggtcatccttttactgcctggaatatttcccatcgcagatgctgagaacgggcaacaactttaccttcagctacacctttgaggacgttcctttccacagcagctacgctcacagccagagtctggaccgtctcatgaatcctctgattgaccagtacctgtactacttgtctcggactcaaacaacaggaggcacggcaaatacgcagactctgggcttcagccaaggtgggcctaatacaatggccaatcaggcaaagaactggctgccaggaccctgttaccgccaacaacgcgtctcaacgacaaccgggcaaaacaacaatagcaactttgcctggactgctgggaccaaataccatctgaatggaagaaattcattggctaatcctggcatcgctatggcaacacacaaagacgacaaggagcgtttttttcccagtaacgggatcctgatttttggcaaacaaaatgctgccagagacaatgcggattacagcgatgtcatgctcaccagcgaggaagaaatcaaaaccactaaccctgtggctacagaggaatacggtatcgtggcagataacttgcagcagcaaaacacggctcctcaaattggaactgtcaacagccagggggccttacccggtatggtctggcagaaccgggacgtgtacctgcagggtcccatctgggccaagattcctcacacggacggcaacttccacccgtctccgctgatgggcggctttggcctgaaacatcctccgcctcagatcctgatcaagaacacgcctgtacctgcggatcctccgaccaccttcaaccagtcaaagctgaactctttcatcacgcaatacagcaccggacaggtcagcgtggaaattgaatgggagctgcagaaggaaaacagcaagcgctggaaccccgagatccagtacacctccaactactacaaatctacaagtgtggactttgctgttaatacagaaggcgtgtactctgatccccaccccattggcacccgttacctcacccgtcccctgtaa

SEQ ID NO: 1008 - DNA, 2211 bp, Artificial Sequence
  source: /note="Description of Artificial Sequence: Synthetic polynucleotide"
atggctgccgatggttatcttccagattggctcgaggacaacctctctgagggcattcgcgagtggtgggcgctgaaacctggagccccgaagcccaaagccaaccagcaagagcaggacgacggccggggtctggtgcttcctggctacaagtacctcggacccttcaacggactcgacaagggagagcccgtcaacgcggcggatgcagcggccctcgagcacgacaaagcctacgaccagcagctcaaagcgggtgacaatccgtacctgcggtataaccacgccgacgccgagtttcaggagcgtctgcaagaagatacgtcttttgggggcaacctcgggcgagcagtcttccaggccaagaagagggttctcgaaccttttggtctggttgaggaaggtgctaagacggctcctggaaagaaacgtccggtagagcagtcgccacaagagccagactcctcctcgggcattggcaagacaggccagcagcccgctaaaaagagactcaattttggtcagactggcgactcagagtcagttccagaccctcaacctctcggagaacctccagcagcgccctctggtgtgggacctaatacaatggctgcaggcggtggcgcaccaatggcagacaataacgaaggcgccgacggagtgggtagttcctcgggaaattggcattgcgattccacatggctgggcgacagagtcatcaccaccagcacccgaacctgggccctgcccacctacaacaaccacctctacaagcaaatctccagtgcttcaacgggggccagcaacgacaaccactacttcggctacagcaccccctgggggtattttgactttaacagattccactgccacttttcaccacgtgactggcagcgactcatcaacaacaactggggattccggcccaagagactcaacttcaagctcttcaacatccaggtcaaggaggtcacgcagaatgaaggcaccaagaccatcgccaataaccttaccagcacgattcaggtctttacggattcggaataccagctcccgtacgtcctcggctctgcgcaccagggctgcctccctccgttcccggcggacgtgttcatgattccgcagtacggctacctaacgctcaacaatggtagccaggcagtgggacggtcatcctttttctgcctggaatatttcccatcgcagatgctgagaacgggcaacaactttaccttcagctacacctttgaggacgttcctttccacagcagctacgctcacagccagagtctggaccgtctcatgaatcctctgattgaccagtacctgtactacttgtctcggactcaaacaacaggaggcacggcaaatacgcagactctgggcttcagccaaggtgggcctaatacaatggccaatcaggcaaagaactggctgccaggaccctgttaccgccaacaacgcgtctcaacgacaaccgggcaaaacaacaatagcaactttgcctggactgctgggaccaaataccatctgaatggaagaaattcattggctaatcctggcatcgctatggcaacacacaaagacgacaaggagcgtttttttcccagtaacgggatcctgatttttggcaaacaaaatgctgccagagacaatgcggattacagcgatgtcatgctcaccagcgaggaagaaatcaaaaccactaaccctgtggctacagaggaatacggtatcgtggcagataacttgcagcagcaaaacacggctcctcaaattggaactgtcaacagccagggggccttacccggtatggtctggcagaaccgagacgtgtacctgcagggtcccatctgggccaagattcctcacacggacggcaacttccacccgtctccgctgatgggcggctttggcctgaaacatcctccgcctcagatcctgatcaagaacacgcctgtacctgcggatcctccgaccaccttcaaccagtcaaagctgaactctttcatcacgcaatacagcaccggacaggtcagcgtggaaattgaatgggagctgcagaaggaaaacagcaagcgctggaaccccgagatccagtacacctccaactactacaaatctacaagtgtggactttgctgttaatacagaaggcgtgtactctgaaccccaccccattggcacccgttacctcacccgtcccctgtaa

SEQ ID NO: 1009 - DNA, 2211 bp, Artificial Sequence
  source: /note="Description of Artificial Sequence: Synthetic polynucleotide"
atggctgccgatggttatcttccagattggctcgaggacaacctctctgagggcattcgcgagtggtgggacttgaaacctggagccccgaagcccaaagccaaccagcaaaagcaggacgacggccggggtctggtgcttcctggctacaagtacctcggacccttcaacggactcgacaagggggagcccgtcaacgcggcggacgcagcggccctcgagcacgacaaggcctacgaccagcagctcaaagcgggtgacaatccgtacctgcggtataaccacgccgacgccgagtttcaggagcgtctgcaagaagatacgtcttttgggggcaacctcgggcgagcagtcttccaggccaagaagcgggttctcgaacctctcggtctggttgaggaaggcgctaagacggctcctggaaagaaacgtccggtagagcagtcaccacaagagccagactcctcctcgggcatcggcaagacaggccagcagcccgctaaaaagagactcaattttggtcagactggcgactcagagtcagtccccgacccacaacctctcggagaacctccagcaacccccgctgctgtgggacctactacaatggcttcaggcggtggcgcaccaatggcggacaataacgaaggcgccgacggagtgggtaatgcctcaggaaattggcattgcgattccacatggctgggcgacagagtcatcaccaccagcacccgaacatgggccttgcccacctataacaaccacctctacaagcaaatctccagtgcttcaacgggggccagcaacgacaaccactacttcggctacagcaccccctgggggtattttgatttcaacagattccactgccatttctcaccacgtgactggcagcgactcatcaacaacaattggggattccggcccaagagactcaacttcaagctcttcaacatccaagtcaaggaggtcacgacgaatgatggcgtcacgaccatcgctaataaccttaccagcacggttcaagtcttctcggactcggagtaccagttgccgtacgtcctcggctctgcgcaccagggctgcctccctccgttcccggcggacgtgttcatgattccgcagtacggctacctaacgctcaacaatggcagccaggcagtgggacggtcatccttttactgcctggaatatttcccatcgcagatgctgagaacgggcaataactttaccttcagctacaccttcgaggacgtgcctttccacagcagctacgcgcacagccagagcctggaccggctgatgaatcctctcatcgaccagtacctgtattacctgaacagaactcagaatcagtccggaagtgcccaaaacaaggacttgctgtttagccgggggtctccagctggcatgtctgttcagcccaaaaactggctacctggaccctgttaccggcagcagcgcgtttctaaaacaaaaacagacaacaacaacagcaactttacctggacaggtgcttcaaaatataaccttaatgggcgtgaatctataatcaaccctggcactgctatggcctcacacaaagacgacaaagacaagttctttcccatgagcggtgtcatgatttttggaaaggagagcgccggagcttcaaacactgcattggacaatgtcatgatcacagacgaagaggaaatcaaagccactaaccccgtggccaccgaaagatttgggactgtggcagtcaatctccagaacagcagcacagaccctgcgaccggagatgtgcatgttatgggagccttacctggaatggtgtggcaagacagagacgtatacctgcagggtcctatttgggccaaaattcctcacacggatggacactttcacccgtctcctctcatgggcggctttggacttaagcacccgcctcctcagatcctcatcaaaaacacgcctgttcctgcgaatcctccggcagagttttcggctacaaagtttgcttcattcatcacccagtattccacaggacaagtgagcgtggagattgaatgggagctgcagaaagaaaacagcaaacgctggaatcccgaagtgcagtatacatctaactatgcaaaatctgccaacgttgatttcactgtagacaacaatggactttatactgtgcctcgccccattggcacccgttacctcacccgtcccctgtaa

SEQ ID NO: 1010 - DNA, 2211 bp, Artificial Sequence
  source: /note="Description of Artificial Sequence: Synthetic polynucleotide"
atggctgccgatggttatcttccagattggctcgaggacaacctctctgagggcattcgcgagtggtgggcgctgaaacctggagccccgaagcccaaagccaaccagcaaaagcaggacgacggccggggtctggtgcttcctggctacaagtacctcggacccttcaacggactcgacaaaggagagccggtcaacgcggcggacgcggcggccctcgaacacgacaaggcttacgaccagcagctcaaggcgggtgacaacccctacctgcggtataaccacgccgacgccgagttccaggagcggctgcaagaagatacgtcttttgggggcaacctcgggcgagcagtcttccaggccaaaaagaggcttcttgaacctcttggtctggttgaggaaggcgctaagacggctcctggaaagaagaggcctgtagagcagtctcctcaagaaccggactcctcctcgggtattggcaaaacaggtgagcagcccgctaaaaagagactcaattttggtcagactggcgactcagagtcagtccccgacccacaacctctcggagaacctccagcaacccccgctgctgtgggacctactacaatggcttcaggcggtggcgcaccaatggcagacaataacgaaggcgccgacggagtgggtagtgcctcaggaaattggcattgcgattccacatggctgggcgacagagtcatcaccaccagcacccgaacctgggccctgcccacctataacaaccatctctacaagcaaatctccagtgcttcaacgggggccagcaacgacaaccactacttcggctacagcaccccctgggggtattttgacttcaacagattccactgccacttctcaccacgtgactggcagcgactcatcaacaacaactggggattccggcctaagcgactcaacttcaagctcttcaacattcaggtcaaagaggttacggacaacaatggagtcaagaccatcgccaataacctcaccagcaccatccaggtgttcacggactcagagtatcagctgccgtacgtgctcgggtcggctcaccagggctgcctccctccgttcccagcggacgtgttcatgattcctcagtacgggtatctgacactcaacaacggcagtcaggcagtgggacggtcatccttctactgcctggaatattttccatcgcagatgctgagaaccggcaacaactttccgttcagttacaccttcgaggacgtgcctttccacagcagctacgcgcacagccagagcctggaccggctgatgaatcctctgattgaccagtacctgtactacttgtctcggactcaaacaacaggaggcacggcaaatacgcagactctgggcttcagccaaggtgggcctaatacaatggccaatcaggcaaagaactggctgccaggaccctgttaccgccaacaacgcgtctcaacgacaaccgggcaaaacaacaatagcaactttgcctggactgctgggaccaaataccatctgaatggaagaaattcattggctaatcctggcatcgctatggcaacacacaaagacgacaaggagcgtttttttcccagtaacgggatcctgatttttggcaaacaaaatgctgccagagacaatgcggattacagcgatgtcatgctcaccagcgaggaagaaatcaaaaccactaaccctgtggctacagaggaatacggtatcgtggcagataacttgcagcagcaaaacacggctcctcaaattggaactgtcaacagccagggggccttacccggtatggtctggcagaaccgggacgtgtacctgcagggtcccatctgggccaagattcctcacacggacggcaacttccacccgtctccgctgatgggcggctttggcctgaaacatcctccgcctcagatcctgatcaagaacacgcctgtacctgcggatcctccgaccaccttcaaccagtcaaagctgaactctttcatcacgcaatacagcaccggacaggtcagcgtggaaattgaatgggagctgcagaaggaaaacagcaagcgctggaaccccgagatccagtacacctccaactactacaaatctacaagtgtggactttgctgttaatacagaaggcgtgtactctgaaccccaccccattggcacccgttacctcacccgtcccctgtaa

SEQ ID NO: 1011 - DNA, 2211 bp, Artificial Sequence
  source: /note="Description of Artificial Sequence: Synthetic polynucleotide"
atggctgccgatggttatcttccagattggctcgaggacaacctctctgagggcattcgcgagtggtgggcgctgaaacctggagccccgaagcccaaagccaaccagcaaaagcaggacgacggccggggtctggtgcttcctggctacaagtacctcggacccttcaacggactcgacaagggggagcccgtcaacgcggcggacgcagcggccctcgagcacgacaaggcctacgaccagcagctcaaagcgggtgacaatccgtacctgcggtataaccacgccgacgccgagtttcaggagcgtctgcaagaagatacgtcttttgggggcaacctcgggcgagcagtcttccaggccaagaagcgggttctcgaacctctcggtctggttgaggaaggcgctaagacggctcctggaaagaaacgtccggtagaacagtcgccacaagagccagactcctcctcgggcatcggcaagacaggccagcagcccgctaaaaagagactcaattttggtcagactggcgactcagagtcagtccccgatccacaacctctcggagaacctccagcaacccccgctgctgtgggacctactacaatggcttcaggcggtggcgcaccaatggcagacaataacgaaggcgccgacggagtgggtagttcctcgggaaattggcattgcgattcccaatggctgggggacagagtcatcaccaccagcacccgaacctgggccctgcccacctacaacaaccacctctacaagcaaatctccagtgcttcaacgggggccagcaacgacaaccactacttcggctacagcaccccctgggggtattttgatttcaacagattccactgccatttctcaccacgtgactggcagcgactcatcaacaacaactggggattccggcctaagcgactcaacttcaagctcttcaacattcaggtcaaagaggttacggacaacaatggagtcaagaccatcgccaataaccttaccagcacggtccaggtcttcacggactcggagtaccagttgccgtacgtcctcggctctgcgcaccaggactgcctccctccgttcccggcggacgtgttcatgattccgcagtacggctacctaacgctcaacaatggcagccaggcagtgggacggtcatccttttactgcctggaatatttcccatcgcagatgctgagaacgggcaacaactttaccttcagctacacctttgaggacgttcctttccacagcagctacgctcacagccagagtctggaccgtctcatgaatcctctgattgaccagtacctgtactacttgtctcggactcaaacaacaggaggcacggcaaatacgcagactctgggcttcagccaaggtgggcctaatacaatggccaatcaggcaaagaactggctgccaggaccctgttaccgccaacaacgcgtctcaacgacaaccggacaaaacaacaatagcaactttgcctggactgctgggaccaaataccatctgaatggaagaaattcattggctaatcctggcatcgctatggcaacacacaaagacgacaaggagcgtttttttcccagtaacgggatcctgatttttggcaaacaaaatgctgccagagacaatgcggattacagcgatgtcatgctcaccagcgaggaagaaatcaaaaccactaaccctgtggctacagaggaatacggtatcgtggcagataacttgcagcagcaaaacacggctcctcaaattggaactgtcaacagccagggggccttacccggtatggtctggcagaaccgggacgtgtacctgcagggtcccatctgggccaagattcctcacacggacggcaacttccacccgtctccgctgatgggcggctttggcctgaaacatcctccgcctcagatcctgatcaagaacacgcctgtacctgcggatcctccgaccaccttcaaccagtcaaagctgaactctttcatcacgcaatacagcaccggacaggtcagcgtggaaattgaatgggagctgcagaaggaaaacagcaagcgctggaaccccgagatccagtacacctccaactactacaaatctacaagtgtggactttgctgttaatacagaaggcgtgtactctgaaccccaccccattggcacccgttacctcacccgtcccctgtaa

SEQ ID NO: 1012 - DNA, 2211 bp, Artificial Sequence
  source: /note="Description of Artificial Sequence: Synthetic polynucleotide"
atggctgccgatggttatcttccagattggctcgaggacaacctctctgagggcattcgcgagtggtgggacttgaaacctggagccccgaagcccaaagccaaccagcaaaagcaggacgacggccggggtctggtgcttcctggctacaagtacctcggacccttcaacggactcgacaagggggagcccgtcaacgcggcggacgcagcggccctcgagcacgacaaggcctacgaccagcagctcaaagcgggtgacaatccgtacctgcggtataaccacgccgacgccgagtttcaggagcgtctgcaagaagatacgtcttttgggggcaacctcgggcgagcagtcttccaggccaagaagcgggttctcgaacctctcggtctggttgaggaaggcgctaagacggctcctggaaagaaacgtccggtagagcagtcaccacaagagccagactcctcctcgggcatcggcaagacaggccagcagcccgctaaaaagagactcaattttggtcagactggcgactcagagtcagtccccgacccacaacctctcggagaacctccagcaacccccgctgctgtgggacctactacaatggcttcaggcggtggcgcaccaatggcagacaataacgaaggtgccgacggagtgggtaatgcctcaggaaattggcattgcgattccacatggctgggcgactgagtcatcaccaccagcacccgcacctgggccttgcccacctacaataaccacctctacaagcaaatctccagtgcttcaacgggggccagcaacgacaaccactacttcggctacagcaccccctgggggtattttgatttcaacagattccactgccacttttcaccacgtgactggcagcgactcatcaacaacaattggggattccggcccaagagactcaacttcaaactcttcaacatccaagtcaaggaggtcacgcagaatgaaggcaccaagaccatcgccaataacctcaccagcaccatccaggtgtttacggactcggagtaccagctgccgtacgttctcggctctgcccaccagggctgcctgcctccgttcccggcggacgtgttcatgattccccagtacggctacctaacgctcaacaatggcagccaggcagtgggacggtcatccttttactgcctggaatactttccttcgcagatgctgagaaccggcaacaacttccagtttacttacaccttcgaggacgtgcctttccacagcagctacgcccacagccagagcttggaccggctgatgaatcctctgattgaccagtacctgtactacttgtctcggactcaaacaacaggaggcacggcaaatacgcagactctgggcttcagccaaggtgggcctaatacaatggccaatcaggcaaagaactggctgccaggaccctgttaccgccaacaacgcgtctcaacgacaaccgggcaaaacaacaatagcaactttgcctggactgctgggaccaaataccatctgaatggaagaaattcattggctaatcctggcatcgctatggcaacacacaaagacgacaaggagcgtttttttcccagtaacgggatcctgatttttggcaaacaaaatgctgccagagacaatgcggattacagcgatgtcatactcaccagcgaggaagaaatcaaaaccactaaccctgtggctacagaggaatacggtatcgtggcagataacttgcagcagcaaaacacggctcctcaaattggaactgtcaacagccagggggccttacccggtatggtctggcagaaccgggacgtgtacctgcagggtcccatctgggccaagattcctcacacggacggcaacttccacccgtctccgctgatgggcggctttggcctgaaacatcctccgcctcagatcctgatcaagaacacgcctgtacctgcggatcctccgaccaccttcaaccagtcaaagctgaactctttcatcacgcaatacagcaccggacaggtcagcgtggaaattgaatgggagctgcagaaggaaaacagcaagcgctggaaccccgagatccagtacacctccaactactacaaatctacaagtgtggactttgctgttaatacagaaggcgtgtactctgaaccccaccccattggcacccgttacctcacccgtcccctgtaa

SEQ ID NO: 1013 - DNA, 2211 bp, Artificial Sequence
  source: /note="Description of Artificial Sequence: Synthetic polynucleotide"
atggctgccgatggttatcttccagattggctcgaggacactctctctgaaggaataagacagtggtggaagctcaaacctggcccaccaccaccaaagcccgcagagcggcataaggacgacagcaggggtcttgtgcttcctgggtacaagtacctcggacccttcaacggactcgacaagggagagccggtcaacgaggcagacgccgcggccctcgagcacgacaaagcctacgaccggcagctcgacagcggagacaacccgtacctcaagtacaaccacgccgacgcggagtttcaggagcgccttaaagaagatacgtcttttgggggcaacctcgggcgagcagtcttccaggccaagaagagggttctcgaaccttttggtctggttgaggaaggtgctaagacggctcctggaaagaaacgtccggtagagcagtcgccacaagagccagactcctcctcgggcattggcaagacaggccagcagcccgctaaaaagagactcaattttggtcagactggcgactcagagtcagtccccgacccacaacctctcggagaacctccagcaacccccgctgctgtgggacctactacaatggcttcaggcggtggcgcaccaatggcagacaataacgaaggcgccgacggagtgggtaatgcctcaggaaattggcattgcgattccacatggctgggcgacagagtcatcaccaccagcacccgaacatgggccttgcccacctataacaaccacctctacaagcaaatctccagtacttcaacgggggccagtaacgacaaccactacttcggctacagcaccccctgggggtattttgacttcaacagattccactgccacttctcaccacgtgactggcagcgactcatcaacaacaactggggattccggcctaagcgactcaacttcaagctcttcaacattcaggtcaaagaggttacggacaacaatggagtcaagaccatcgccaataaccttaccagcacggtccaggtcttcacggactcggagtaccagttgccgtacgtcctcggctctgcgcaccagggctgcctgcctccgttcccggcggacgtgttcatgattccgcagtacggctacctaacgctcaacaatggcagccaggcagtgggacggtcatccttttactgcctggaatatttcccatcgcagatgctgagaacgggcaacaactttaccttcagctacacttttgaggacgttcctttccacagcagctacgctcacagccagagtctggaccgtctcatgaatcctctgattgaccagtacctgtactacttgtctcggactcaaacaacaggaggcacggcaaatacgcagactctgggcttcagccaaggtgggcctaatacaatggccaatcaggcaaagaactggctgccaggaccctgttaccgccaacaacgcgtctcaacgacaaccggacaaaacaacaatagcaactttgcctggactgctgggaccaaataccatctgaatggaagaaattcattggctaatcctggcatcgctatggcaacacacaaagacgacaaggagcgtttttttcccagtaacgggatcctgatttttggcaaacaaaatgctgccagagacaatgcggattacagcgatgtcatgctcaccagcgaggaagaaatcaaaaccactaaccctgtggctacagaggaatacggtatcgtggcagataacttgcagcagcaaaacacggctcctcaaattggaactgtcaacagccagggggccttacccggtatggtctggcagaaccgggacgtgtacctgcagggtcccatctgggccaagattcctcacacggacggcaacttccacccgtctccgctgatgggcggctttggcctgaaacatcctccgcctcagatcctgatcaagaacacgcctgtacctgcggatcctccgaccaccttcaaccagtcaaagctgaactctttcatcacgcaatacagcaccggacaggtcagcgtggaaattgaatgggagctgcagaaggaaaacagcaagcgctggaaccccgagatccagtacacctccaactactacaaatctacaagtgtggactttgctgttaatacagaaggcgtgtactctgaaccccaccccattggcacccgttacctcacccgtcccctgtaa

SEQ ID NO: 1014 - DNA, 2208 bp, Artificial Sequence
  source: /note="Description of Artificial Sequence: Synthetic polynucleotide"
atggctgccgatggttatcttccagattggctcgaggacaacctctctgagggcattcgcgagtggtgggacttgaaacctggagccccgaagcccaaagccaaccagcaaaagcaggacgacggccggggtctggtgcttcctggctacaagtacctcggacccttcaacggactcgacaagggggagcccgtcaacgcggcggatgcagcggccctcgagcacgacaaggcctacgaccggcagctcgacagcggagacaacccgtacctgcggtataaccacgccgacgcggagtttcaggagcgccttaaagaagatacgtcttttgggggcaacctcgggcgagcagtcttccaggccaagaagagggttctcgaaccttttggtctggttgaggaaggtgctaagacggctcctggaaagaaacgtccggtagagcagtcgccacaagagccagactcctcctcgggcattggcaagacaggccagcagcccgctaaaaagagactcaattttggtcagactggcgactcagagtcagtccccgacccacaacctctcggagaacctccagcaacccccgctgctgtgggacctactacaatggcttcaggcggtggcgcaccaatggcagacaataacgaaggcgccgacggagtgggtaatgcctcaggaaattggcattgcgattccacatggctgggcgacagagtcatcaccaccagcacccgcacctgggccttgcccacctacaataaccacctctacaagcaaatctccagtgcttcaacgggggccagcaacgacaaccactacttcggctacagcaccccctgggggtattttgactttaacagattccactgccacttttcaccacgtgactggcaaagactcatcaacaacaactggggattccggcccaagagactcaacttcaagctcttcaacatccaggtcaaggaggtcacgcagaatgaaggcaccaagaccatcgccaataaccttaccagcacgattcaggtctttacggactcggaataccagctcccgtacgtcctcggctctgcgcaccagggctgcctccctccgttcccggcggacgtgttcatgattccgcagtacggctacctaacactcaacaacggtagtcaggccgtgggacgctcctccttctactgcctggaatactttccttcgcagatgctgagaaccggcaacaacttccagtttacttacaccttcgaggacgtgcctttccacagcagctacgcccacagccagagcttggaccggctgatgaatcctctgattgaccagtacctgtactacttgtctcggactcaaacaacaggaggcacggcaaatacgcagactctgggcttcagccaaggtgggcctaatacaatggccaatcaggcaaagaactggctgccaggaccctgttaccgccaacaacgcgtctcaacgacaaccgggcaaaacaacaatagcaactttgcctggactgctgggaccaaataccatctgaatggaagaaattcactggctaatcctggcatcgctatggcaacacacaaagacgacaggagcgtttttttccagtaccgggatcctgattttggcaaacaaaatgctgccagagacaatgcggattacagcgatgtcatgctcaccagcgaggaagaaatcaaaaccactaaccctgtggctacagaggaatacggtatcgtggcagataacttgcagcagcaaaacacggctcctcaaattggaactgtcaacagccagggggccttacccggtatggtctggcagaaccgggacgtgtacctgcagggtcccatctgggccaagattcctcacacggacggcaacttccacccgtctccgctgatgggcggctttggcctgaaacatcctccgcctcagatcctgatcaagaacacgcctgtacctgcggatcctccgaccaccttcaaccagtcaaagctgaactctttcatcacgcaatacagcaccggacaggtcagcgtggaaattgaatgggagctgcagaaggaaaacagcaagcgctggaaccccgagatccagtacacctccaactactacaaatctacaagtgtggactttgctgttaatacagaaggcgtgtactctgaaccccaccccattggcacccgttacctcacccgtcccctgtaa

SEQ ID NO: 1015 - DNA, 2211 bp, Artificial Sequence
  source: /note="Description of Artificial Sequence: Synthetic polynucleotide"
atggctgccgatggttatcttccagattggctcgaggacaacctctctgagggcattcgcgagtggtgggcgctgaaacctggagccccgaagcccaaagccaaccagcaaaagcaggacgacggccggggtctggtgcttcctggctacaagtacctcggacccttcaacggactcgacaagggggagcccgtcaacgcggcggatgcagcagccctcgaacacgacaaagcttacgaccagcagctcaaggccggtgacaacccctacctcaagtataaccacgccgacgccgagtttcaggagcgtcttcaaggagatacgtcttttgggggcaacctcggacgagcagtcttccaggccaagaagcgggttctcgaacctcttggtctggttgaggaagcggctaagacggctcctggaaagaagaggcctgtagagcagtctcctcaggaaccggactcctccgcgggtattggcaaatcgggtgcacagcccgctaaaaagagactcaatttcggtcagactggcgacacagagtcagtcccagaccctcaacctctcggagaacctccagcagcgccctctggtgtgggacctaatacaatggctgcaggcggtggcgcaccaatggcagacaataacgaaggtgccgatggagtgggtagttcctcgggaaattggcattgcgattcccaatggctgggggacagagtcatcaccaccagcacccgaacctgggccctgcccacctacaacaaccacctctacaagcaaatctccagtgcttcaacgggggccagcaacgacaaccactacttcggctacagcaccccttgggggtattttgacttcaacagattccactgccacttttcaccacgtgactggcagcgactcatcaacaacaactggggattccggcctaagcgactcaacttcaagctcttcaacattcaggtcaaagaggttacggacaacaatggagtcaagaccatcgccaataaccttaccagcacggtccaggtcttcacggactcagactatcagctcccgtacgtgctcgggtcggctcacgagggctgcctccctccgttcccggcggacgtgttcatgattccgcagtacggctacctaacgctcaacaatggcagccaggcagtgggacggtcatccttttactgcctggaatactttccttcgcagatgctgagaaccggcaacaacttccagtttacttacaccttcgaggacgtgcctttccacagcagctacgctcacagccagagtctggaccgtctcatgaatcctctgattgaccagtacctgtactacttgtctcggactcaaacaacaggaggcacggcaaatacgcagactctgggcttcagccaaggtgggcctaatacaatggccaatcaggcaaagaactggctgccaggaccctgttaccgccaacaacgcgtctcaacgacaaccgggcaaaacaacaatagcaactttgcctggactgctgggaccaaataccatctgaatggaagaaattcattggctaatcctggcatcgctatggcaacacacaaagacgacaaggagcgtttttttcccagtaacgggatcctgatttttggcaaacaaaatgctgccagagacaatgcggattacagcgatgtcatgctcaccagcgaggaagaaatcaaaaccactaaccctgtggctacagaggaatacggtatcgtagcagataacttgcagcagcaaaacacggctcctcaaattggaactgtcaacagccagggggccttacccggtatggtctggcagaaccgggacgtgtacctgcagggtcccatctgggccaagattcctcacacggacggcaacttccacccgtctccgctgatgggcggctttggcctgaaacatcctccgcctcagatcctgatcaagaacacgcctgtacctgcggatcctccgaccaccttcaaccagtcaaagctgaactctttcatcacgcaatacagcaccggacaggtcagcgtggaaattgaatgggagctgcagaaggaaaacagcaagcgctggaaccccgagatccagtacacctccaactactacaaatctacaagtgtggactttgctgttaatacagaaggcgtgtactctgaaccccaccccattggcacccgttacctcacccgtcccctgtaa

SEQ ID NO: 1016 - DNA, 2211 bp, Artificial Sequence
  source: /note="Description of Artificial Sequence: Synthetic polynucleotide"
atggctgccgatggttatcttccagattggctcgaggacactctctctgaaggaataagacagtggtggaagctcaaacctggcccaccaccaccaaagcccgcagagcggcataaggacgacagcaggggtcttgtgcttcctgggtacaagtacctcggacccttcaacggactcgacaagggagagccggtcaacgaggcagacgccgcggccctcgagcacgacaaagcctacgaccggcagctcgacagcggagacaacccgtacctcaagtacaaccacgccgacgcggagtttcaggagcgccttaaagaagatacgtcttttgggggcaacctcgggcgagcagtcttccaggccaagaagagggttctcgaaccttttggtctggttgaggaagcggctaagacggctcctggaaagaaacgtccggtagagcagtcgccacaagagccagactcctcctcgggcattggcaagacaggccagcagcccgctaaaaagagactcaattttggtcagactggcgactcagagtcagtccccgacccacaacctctcggagaacctccagcaacccccgctgctgtgggacctactacaatggcttcaggcggtggcgcaccaatggcagacaataacgaaggcgccgacggagtgggtaatgcctcaggaaattggcattgcgattccacatggctgggcgacagagtcatcaccaccagcacccgaacatgggccttgcccacctataacaaccacctctacaagcaaatctccagtgcttcaacgggggccagcaacgacaaccactacttcggctacagcaccccctgggggtattttgacttcaacagattccactgccacttctcaccacgtgactggcagcgactcatcaacaacaactggggattccggcctaagcgactcaacttcaagctcttcaacattcaggtcaaagaggttacggacaacaatggagtcaagaccatcgccaataaccttaccagcacggtccaggtcttcacggactcagactatcagctcccgtacgtgctcgggtcggctcacgagggctgcctcccgccgttcccagcggacgttttcatgattcctcagtacggctacctaacactcaacaacggtagtcaggccgtgggacgctcctccttctactgcctggaatactttccttcgcagatgctgagaacgggcaacaactttaccttcagctacacctttgaggacgttcctttccacagcagctacgctcacagccagagtctggaccgtctcatgaatcctctgattgaccagtacctgtactacttgtctcggactcaaacaacaggaggcacggcaaatacgcagactctgggcttcagccaaggtgggcctaatacaatggccaatcaggcaaagaactggctgccaggaccctgttaccgccaacaacgcgtctcaacgacaaccgggcaaaacaacaatagcaactttgcctggactgctgggacaaaataccatctgaatggaagaaattcattggctaatcctggcatcgctatggcaacacacaaagacgacaaggagcgtttttttcccagtaacgggattctgatttttggcaaacaaaatgctgccagagacaatgcggattacagcgatgtcatgctcaccagcgaggaagaaatcaaaaccactaaccctgtggctacagaggaatacggtatcgtggcagataacttgcagcagcaaaacacggctcctcaaattggaactgtcaacagccagggggccttacccggtatggtctggcagaaccgggacgtgtacctgcagggtcccatctgggccaagattcctcacacggacggcaacttccacccgtctccgctgatgggcggctttggacttaagcacccgcctcctcagatcctcatcaaaaacacgcctgttcctgcggatcctccgaccaccttcaaccagtcaaagctgaactctttcatcacgcaatacagcaccggacaggtcagcgtggaaattgaatgggagctgcagaaggaaaacagcaagcgctggaaccccgagatccagtacacctccaactactacaaatctacaagtgtggactttgctgttaatacagaaggcgtgtactctgaaccccaccccattggcacccgttacctcacccgtcccctgtaa

SEQ ID NO: 1017 - DNA, 2211 bp, Artificial Sequence
  source: /note="Description of Artificial Sequence: Synthetic polynucleotide"
atggctgccgatggttatcttccagattggctcgaggacaacctctctgagggcattcgcgagtggtgggcgctgaaacctggagccccgaagcccaaagccaaccagcaaaagcaggacgacggccggggtctggtgcttcctggctacaagtacctcggacccttcaacggactcgacaaaggagagccggtcaacgcggcggacgcagcggccctcgagcacgacaaggcctacgaccagcagctcaaagcgggtgacaatccgtacctgcggtataaccacgccgacgccgagtttcaggagcgtctgcaagaagatacgtcttttgggggcaacctcgggcgagcagtcttccaggccaagaagcgggttctcgaacctctcggtctggttgaggaaggcgctaagacggctcctggaaagaaacgtccggtagagcagtcgccacaagagccagactcctcctcgggcatcggcaagacaggccagcagcccgctaaaaagagactcaattttggtcagactggcgactcagagtcagtccccgacccacaacctctcggagaacctccagcaacccccgctgctgtgggacctactacaatggcttcaggcggtggcgcaccaatggcagacaataacgaaggcgccgacggagtgggtagttcctcgggaaattggcattgcgattccacatggctgggcgacagagtcatcaccaccagcacccgcacctgggccttgcccacctacaataaccacctctacaagcaaatctccagtgcttcaacgggggccagcaacgacaaccactacttcggctacagcaccccctgggggtattttgacttcaacagattccactgccacttctcaccacgtgactggcagcgactcatcaacaacaactggggattccggcctaagcgactcaacttcaagctcttcaacattcaggtcaaagaggttacggacaacaatggagtcaagaccatcgccaataaccttaccagcacggtccaggtcttcacggactcggagtaccagttgccgtacgtcctcggctctgcgcaccagggctgcctccctccgttcccggcggacgtgttcatgattccgcagtacggctacctaacgctcaacaatggcagccaggcagtgggacggtcatccttttactgcctggaatatttcccatcgcagatgctgagaacgggcaacaactttaccttcagctacacctttgaggacgttcctttccacagcagctacgctcacagccagagtctggaccgtctcatgaatcctctgattgaccagtacctgtactacttgtctcggactcaaacaacaggaggcacggcaaatacgcagactctgggcttcagccaaggtgggcctaatacaatggccaatcaggcaaagaactggctgccaggaccctgttaccgccaacaacgcgtctcaacgacaaccgggcaaaacaacaatagcaactttgcctggactgctgggaccaaataccatctgaatggaagaaattcattggctaatcctggcatcgctatggcaacacacaaagacgacaaggagcgtttttttcccagtaacgggatcctgatttttggcaaacaaaatgctgccagagacaatgcggattacagcgatgtcatgctcaccagcgaggaagaaatcaaaaccactaaccctgtggctacagaggaatacggtatcgtggcagataacttgcagcagcaaaacacggctcctcaaattggaactgtcaacagccagggggccttacccggtatggtctggcagaaccgggatgtgtacctgcagggtcccatctgggccaagattcctcacacggacggcaacttccacccgtctccgctgatgggcggctttggcctgaaacatcctccgcctcagatcctgatcaagaacacgcctgtacctgcggatcctccgaccaccttcaaccagtcaaagctgaactctttcatcacgcaatacagcaccggacaggtcagcgtggaaattgaatgggagctgcagaaggaaaacagcaagcgctggaaccccgagatccagtacacctccaactactacaaatctacaagtgtggactttgctgttaatacagaaggcgtgtactctgaaccccaccccattggcacccgttacctcacccgtcccctgtaa

SEQ ID NO: 1018 - DNA, 2214 bp, Artificial Sequence
  source: /note="Description of Artificial Sequence: Synthetic polynucleotide"
atggctgccgatggttatcttccagattggctcgaggacaaccttagtgaaggaattcgcgagtggtgggcgctgaaacctggagccccgaagcccaaagccaaccagcaaaagcaggacgacggccggggtctggtgcttcctggctacaagtacctcggacccttcaacggactcgacaagggggagcccgtcaacgcggcggacgcagcggccctcgagcacgacaaggcctacgaccagcagctcaaagcgggtgacaatccgtacctgcggtataaccacgccgacgccgagtttcaggagcgtctgcaagaagatacgtcttttgggggcaacctcgggcgagcagtcttccaggccaagaagcgggttctcgaacctctcggtctggttgaggaaggcgctaagacggctcctggaaagaaacgtccggtagagcagtcgccacaagagccagactcctcctcgggcatcggcaagacaggccagcagcccgctaaaaagagactcaatttcggtcagactggcgacacagagtcagtcccagaccctcaaccaatcggagaacctcccgcagccccctcaggtgtgggatctcttacaatggcttcaggtggtggcgcaccagtggcagacaataacgaaggtgccgatggagtgggtagttcctcgggaaattggcattgcgattcccaatggctgggggacagagtcatcaccaccagcaccagaacctgggccttgcccacctacaataaccacctctacaagcaaatctccaacagcacatctggaggatcttcaaatgacaacgcctacttcggctacagcaccccctgggggtattttgactttaacagattccactgccacttttcaccacgtgactggcagcgactcatcaacaacaactggggattccgacccaagagactcaacttcaagctcttcaacatccaggtcaaggaggtcacgcagaacgaaggcaccaagaccatcgccaataacctcaccagcaccatccaggtgtttacggactcggagtaccagctgccgtacgttctcggctccgcccaccagggctgcctgcctccgttcccggcggacgtgttcatgattccccagtacggctacctaacgctcaacaacggtagtcaggccgtgggacgctcctccttctactgcctggaatactttccttcgcagatgctgagaaccggcaacaacttccagtttacttacaccttcgaggacgtgcctttccacagcagctacgcgcacagccagagcttggaccggctgatgaatcctctgattgaccagtacctgtactacttgtctcggactcaaacaacaggaggcacggcaaatacgcagactctgggcttcagccaaggtgggcctaatacaatggccaatcaggcaaagaactggctgccaggaccctgttaccgccaacaacgcgtctcaacgacaaccgggcaaaacaacaatagcaactttgcctggactgctgggaccaaataccatctgaatggaagaaattcattggctaatcctggcatcgctatggcaacacacaaagacgacaaggagcgtttttttcccagtaacgggatcctgatttttggcaaacaaaatgctgccagagacaatgcggattacagcgatgtcatgctcaccagcgaggaagaaatcaaaaccactaaccctgtggctacagaggaatacggtatcgtggcagataacttgcagcagcaaaacacggctcctcaaattggaactgtcaacagccagggggccttacccggtatggtctggcagaaccgggacgtgtacctgcagggtcccatctgggccaagattcctcacacggacggcaacttccacccgtctccgctgatgggcggctttggcctgaaacatcctccgcctcagatcctgatcaagaacacgcctgtacctgcggatcctccgaccaccttcaaccagtcaaagctgaactctttcatcacgcaatacagcaccggacaggtcagcgtggaaattgaatgggagctgcagaaggaaaacagcaagcgctggaaccccgagatccagtacacctccaactactacaaatctacaagtgtggactttgctgttaatacagaaggcgtgtactctgaaccccaccccattggcactcgttacctcacccgtcccctgtaa

SEQ ID NO: 1019 - DNA, 2211 bp, Artificial Sequence
  source: /note="Description of Artificial Sequence: Synthetic polynucleotide"
atggctgccgatggttatcttccagattggctcgaggacaacctctctgagggcattcgcgagtggtgggcgctgaaacctggagccccgaagcccaaagccaaccagcaaaagcaggacgacggccggggtctggtgcttcctggctacaagtacctcggacccttcaacggactcgacaagggggagcccgtcaacgcggcggatgcagcagccctcgaacacgacaaagcttacgaccagcagctcaaggccggtgacaacccctacctcaagtataaccacgccgacgccgagtttcaggagcgtcttcaaggagatacgtcttttgggggcaacctcggacgagcagtcttccaggccaagaagcgggttctcgaacctcttggtctggttgaggaagcggctaagacggctcctggaaagaagaggcctgtagagcagtctcctcaggaaccggactcctccgcgggtattggcaaatcgggtgcacagcccgctaaaaagagactcaatttcggtcagactggcgacacagagtcagtcccagaccctcaacctctcggagaacctccagcagcgccctctggtgtgggacctaatacaatggctgcaggcggtggcgcaccaatggcagacaataacgaaggtgccgatggagtgggtagttcctcgggaaattggcattgcgattcccaatggctgggggacagagtcatcaccaccagcacccgaacctgggccctgcccacctacaacaaccacctctacaagcaaatctccagtgcttcaacgggggccagcaacgacaaccactacttcggctacagcaccccttgggggtattttgacttcaacagattccactgccacttctcaccacgtgactggcagcgactcatcaacaacaactggggattccggcctaagcgactcaacttcaagctcttcaacattcaggtcaaagaggttacggacaacaatggagtcaagaccatcgccaataaccttaccagcacggtccaggtcttcacggactcggagtaccagttgccgtacgtcctcggctctgcgcaccagggctgcctccctccgttcccggcggacgtgttcatgattccgcagtacggctacctaacgctcaacaatggcagccaggcagtgggacggtcatccttttactgcctggaatatttcccatcgcagatgctgagaacgggcaacaactttaccttcagctacacctttgaggacgttcctttccacagcagctacgctcacagccagagtctggaccgtctcatgaatcctctgattgaccagtacctgtactacttgtctcggactcaaacaacaggaggcacggcaaatacgcagactctgggcttcagccaaggtgggcctaatacaatggccaatcaggcaaagaactggctgccaggaccctgttaccgccaacaacgcgtctcaacgacaaccgggcaaaacaacaatagcaactttgcctggactgctgggaccaaataccatctgaatggaagaaattcattggctaatcctggcatcgctatggcaacacacaaagacgacaaggagcgtttttttcccagtaacgggatcctgatttttgacaaacaaaatgctgccagagacaatgcggattacagcgatgtcatgctcaccagcgaggaagaaatcaaaaccactaaccctgtggctacagaggaatacggtatcgtggcagataacttgcagcagcaaaacacggctcctcaaattggaactgtcaacagccagggggccttacccggtatggtctggcagaaccgggatgtgtacctgcagggtcccatctgggccaagattcctcacacggacggcaacttccacccgtctccgctgatgggcggctttggcctgaaacatcctccgcctcagatcctgatcaagaacacgcctgtacctgcggatcctccgaccaccttcaaccagtcaaagctgaactctttcatcacgcaatacagcaccggacaggtcagcgtggaaattgaatgggagctgcagaaggaaaacagcaagcgctggaaccccgagatccagtacacctccaactactacaaatctacaagtgtggactttgctgttaatacagaaggcgtgtactctgaaccccaccccattggcacccgttacctcacccgtcccctgtaa

SEQ ID NO: 1020 - DNA, 2211 bp, Artificial Sequence
  source: /note="Description of Artificial Sequence: Synthetic polynucleotide"
atggctgccgatggttatcttccagattggctcgaggacactctctctgaaggaataagacagtggtggaagctcaaacctggcccaccaccaccaaagcccgcagagcggcataaggacgacagcaggggtcttgtgcttcctgggtacaagtacctcggacccttcaacggactcgacaagggagagccggtcaacgaggcagacgccgcggccctcgagcacgacaaagcctacgaccggcagctcgacagcggagacaacccgtacctcaagtacaaccacgccgacgcggagtttcaggagcgccttaaagaagatacgtcttttgggggcaacctcggacgagcagtcttccaggcgaaaaagagggttcttgaacctctgggcctggttgaggaacctgttaagacggctccgggaaaaaagaggccggtagagcactctcctgtggagccagactcctcctcgggaaccggaaaggcgggccagcagcctgcaagaaaaagattgaattttggtcagactggcgactcagagtcagtccccgacccacaacctctcggagaacctccagcaacccccgctgctgtgggacctaatacgatggctacaggcagtggcgcaccaatggcagacaataacgagggcgccgacggagtgggtaattcctcgggaaattggcattgcgattccacatggatgggcgacagagtcatcaccaccagcaccagaacctgggccctgcccacttacaacaaccatctctacaagcaaatctccagtgcttcaacgggggccagcaacgacaaccactacttcggctacagcaccccctgggggtattttgacttcaacagattccactgccacttctcaccacgtgactggcagcgactcatcaacaacaactggggattccggcctaagcgactcaacttcaagctcttcaacattcaggtcaaagaggttacggacaacaatggagtcaagaccatcgccaataaccttaccagcaccatccaggtctttacggactcggaataccagctgccgtacgttctcggctctgcccaccagggctgcctgcctccgttcccggcggacgtgttcatgattccccagtacggctacctaacactcaacaacggtagtcaggccgtgggacgctcctccttctactgcctggaatatttcccatcgcagatgctgagaacgggcaacaactttaccttcagctacacctttgaggacgttcctttccacagcagctacgctcacagccagagtctggaccgtctcatgaatcctctgattgaccagtacctgtactacttgtctcggactcaaacaacaggaggcaaggcaaatacgcagactctgggcttcagccaaggtgggcctaatacaatggccaatcaggcaaagaactggctgccaggaccctgttaccgccaacaacgcgtctcaacgacaaccgggcaaaacaacaatagcaactttgcctggactgctgggaccaaataccatctgaatggaagaaattcattggctaatcctggcatcgctatggcaacacacaaagacgacaaggagcgtttttttcccagtaacgggatcctgatttttggcaaacaaaatgctgccagagacaatgcggattacagcgatgtcatgctcaccagcgaggaagaaatcaaaaccactaaccctgtggctacagaggaatacggtatcgtggcagataacttgcagcagcaaaacacggctcctcaaattggaactgtcaacagccagggggccttacccggtatggtctggcagaaccgggacgtgtacctgcagggtcccatctgggccaagattcctcacacggacggcaacttccacccgtctccgctgatgggcggctttggcctgaaacatcctccgcctcagatcctgatcaagaacacgcctgtacctgcggatcctccgaccaccttcaaccagtcaaagctgaactctttcatcacgcaatacagcaccggacaggtcagcgtggaaattgaatgggagctgcagaaggaaaacagcaagcgctggaaccccgagatccagtacacctccaactactacaaatctacaagtgtggactttgctgttaatacagaaggcgtgtactctgaaccccaccccattggcacccgttacctcacccgtcccctgtaa

SEQ ID NO: 1021 - DNA, 2211 bp, Artificial Sequence
  source: /note="Description of Artificial Sequence: Synthetic polynucleotide"
atggctgccgatggttatcttccagattggctcgaggacaacctctctgagggcattcgcgagtggtgggcgctgaaacctggagccccgaagcccaaagccaaccagcaaaagcaggacgacggccggggtctggtgcttcctggctacaagtacctcggacccttcaacggactcgacaagggggagcccgtcaacgcggcggacgcagcggccctcgagcacgacaaggcctacgaccagcagctcaaagcgggtgacaatccgtacctgcggtataaccacgccgacgccgagtttcaggagcgtctgcaagaagatacgtcttttgggggcaacctcgggcgagcagtcttccaggccaagaagcgggttctcgaaccttttggtctggttgaggaaggtgctaagacggctcctggaaagaaacgtccggtagagcagtcgccacaagagccagactcctcctcgggcatcggcaagacaggccagcagcccgctaaaaagagactcaattttggtcagactggcgactcagagtcagtccccgacccacaacctctcggagaacctccagcaacccccgctgctgtgggacctactacaatggcttcaggcggtggcgcaccaatggcggacaataacgaaggcgccgacggagtgggtaatgcctcaggaaattggcattgcgattccacatggctgggcgacagagtcatcaccaccagcacccgcacctgggccttgcccacctacaataaccacctctacaagcaaatctccagtgcttcaacgggggccagcaacgacaaccactacttcggctacagcaccccctgggggtattttgacttcaacagattccactgccacttttcaccacgtgactggcaaagactcatcaacaacaactggggattccggcctaagcgactcaacttcaagctcttcaacattcaggtcaaagaggttacggacaacaatggagtcaagaccatcgccaataaccttaccagcacggtccaggtcttcacggactcggagtaccagttgccgtacgtcctcggctctgcgcaccagggctgcctccctccgttcccggcggacgtgttcatgattccgcagtacggctacctaacgctcaacaatggcagccaggcagtgggacggtcatccttttactgcctggaatatttcccatcgcagatgctgagaacgggcaacaactttaccttcagctacacctttgaggacgttcctttccacagcagctacgctcacagccagagtctggaccgtctcatgaatcctctgattgaccagtacctgtactacttgtctcggactcaaacaacaggaggcacgggaaatacgcagactctgggcttcagccaaggtgggcctaatacaatggccaatcaggcaaagaactggctgccaggaccctgttaccgccaacaacgcgtctcaacgacaaccgggcaaaacaacaatagcaactttgcctggactgctgggaccaaataccatctgaatggaagaaattcattggctaatcctggcatcgctatggcaacacacaaagacgacaaggagcgtttttttcccagtaacgggatcctgatttttggcaaacaaaatgctgccagagacaatgcggattacagcgatgtcatgctcaccagcgaggaagaaatcaaaaccactaaccctgtggctacagaggaatacggtatcgtggcagataacttgcagcagcaaaacacggctcctcaaattggaactgtcaacagccagggggccttacccggtatggtctggcagaaccgggacgtgtacctgcagggtcccatctgggccaagattcctcacacggacggcaacttccacccgtctccgctgatgggcggctttggcctgaaacatcctccgcctcagatcctgatcaagaacacgcctgtacctgcggatcctccgaccaccttcaaccagtcaaagctgaactctttcatcacgcaatacagcaccggacaggtcagcgtggaaattgaatgggagctgcagaaggaaaacagcaagcgctggaaccccgagatccagtacacctccaactactacaaatctacaagtgtggactttgctgttaatacagaaggcgtgtactctgaaccccaccccattggcacccgttacctcacccgtcccctgtaa

SEQ ID NO: 1022 - DNA, 2211 bp, Artificial Sequence
  source: /note="Description of Artificial Sequence: Synthetic polynucleotide"
atggctgccgatggttatcttccagattggctcgaggacaacctctctgagggcattcgcgagtggtgggacttgaaacctggagccccgaaacccaaagccaaccagcaaaagcaggacgacggccggggtctggtgcttcctggctacaagtacctcggacccttcaacggactcgacaagggggagcccgtcaacgcggcggacgcagcggccctcgagcacgacaaggcctacgaccagcagctcaaagcgggtgacaatccgtacctgcggtataaccacgccgacgccgagtttcaggagcgtctgcaagaagatacgtcttttgggggcaacctcgggcgagcagtcttccaggccaagaagcgggttctcgaacctctcggtctggttgaggaaggcgctaagacggctcctggaaagaagaggcctgtagagcagtcgccacaagagccagactcctcctcgggcatcggcaagacaggccagcagcccgctaaaaagagactcaattttggtcagactggcgactcagagtcagtccccgatccacaacctctcggagaacctccagcaacccccgctgctgtgggacctactacaatggcttcaggcggtggcgcaccaatggcagacaataacgaaggcgccgacggagtgggtagttcctcgggaaattggcattgcgattccacatggctgggcgacagagtcatcaccaccagcacccgaacatgggccttgcccacctataacaaccacctctacaagcaaatctccagtgcttcaacgggggccagcaacgacaaccactacttcggctacagcaccccctgggggtattttgacttcaacagattccactgccacttctcaccacgtgactggcagcgactcatcaacaacaactggggattccggcctaagcgactcaacttcaagctcttcaacatccaggtcaaggaggtcacgcagaatgaaggcaccaagaccatcgccaataacctcaccagcaccatccaggtgtttacggactcggagtaccagcttccgtacgtcctcggctctgcgcaccagggctgcctccctccgttcccggcggacgtgttcatgattccgcagtacggctacctaacgctcaacaatggcagccaggcagtgggacggtcatccttttactgcctggaatatttcccatcgcagatgctgagaacgggcaacaactttaccttcagctacacctttgaggacgttcctttccacagcagctacgcgcacagccagagcttggaccggctgatgaatcctctgattgaccagtacctgtactacttgtctcggactcaaacaacaggaggcacggcaaatacgcagactctgggcttcagccaaggtgggcctaatacaatggccaatcaggcaaagaactggctgccaggaccctgttaccgccaacaacgcgtctcaacgacaaccgggcaaaacaacaatagcaactttgcctggactgctgggaccaaataccatctgaatggaagaaattcattggctaatcctggcatcgctatggcaacacacaaagacgacaaggagcgtttttttcccagtaacgggatcctgatttttggcaaacaaaatgctgccagagacaatgcggattacagcgatgtcatgctcaccagcgaggaagaaatcaaaaccactaaccctgtggctacagaggaatacggtatcgtggcagataacttgcagcagcaaaacacggctcctcaaattggaactgtcaacagccagggggccttacccggtatggtctggcagaaccgggacgtgtacctgcagggtcccatctgggccaagattcctcacacggacggcaacttccacccgtctccgctgatgggcggctttggcctgaaacatcctccgcctcagatcctgatcaagaacacgcctgtacctgcggatcctccgaccaccttcaaccagtcaaagctgaactctttcatcacgcaatacagcaccggacaggtcagcgtggaaattgaatgggagctgcagaaggaaaacagcaagcgctggaaccccgagatccagtacacctccaactactacaaatctacaagtgtggactttgctgttaatacagaaggcgtgtactctgaaccccaccccattggcacccgttacctcacccgtcccctgtaa

SEQ ID NO: 1023 - DNA, 2211 bp, Artificial Sequence
  source: /note="Description of Artificial Sequence: Synthetic polynucleotide"
atggctgccgatggttatcttccagattggctcgaggacaacctctctgagggcattcgcgagtggtgggcgctgaaacctggagccccgaagcccaaagccaaccagcaaaagcaggacgacggccggggtctggtgcttcctggctacaagtacctcggacccttcaacggactcgacaagggggagcccgtcaacgcggcggatgcagcggccctcgagcacgacaaggcctacgaccagcagctcaaagcgggtgacaatccgtacctgcggtataaccacgccgacgccgagtttcaggagcgtctgcaagaagatacgtcttttgggggcaacctcgggcgagcagtcttccaggccaagaagcgggttctcgaacctctcggtctggttgaggaaggcgctaagacggctcctggaaagaaacgtccggtagagcagtcgccacaagagccagactcctcctcgggcatcggcaagacaggccagcagcccgctaaaaagagactcaattttggtcagactggcgactcagagtcagtccccgacccacaacctctcggagaacctccagcaacccccgctgctgtgggacctactacaatggctgcaggcggtggcgcaccaatggcagacaataacgaaggcgccgacggagtgggtagttcctcgggaaattggcattgcgattccacatggatgggcgacagagtcatcaccaccagcacccgaacctgggccttgcccacctataacaaccatctctacaagcaaatctccagtgcttcaacgggggccagcaacgacaaccactacttcggctacagcaccccctgggggtattttgacttcaacagattccactgccacttctcaccacgtgactggcagcgactcatcaacaacaactggggattccggcccaagagactcagcttcaagctcttcaacatccaggtcaaggaggtcacgcagaatgaaggcaccaagaccatcgccaataacctcaccagcaccatccaggtgtttacggactcggagtaccagctgccgtacgtcctcggctctgcgcaccagggctgcctccctccgttcccggcggacgtgttcatgattccgcagtacggctacctaacgctcaacaatggcagccaggcagtgggacggtcatccttttactgcctggaatatttcccatcgcagatgctgagaacgggcaacaactttaccttcagctacacctttgaggacgttcctttccacagcagctacgctcacagccagagcttggaccggctgatgaatcctctgattgaccagtacctgtactacttgtctcggactcaaacaacaggaggcacggcaaatacgcagactctgggtttcagccaaggtgggcctaatacaatggccaatcaggcaaagaactggctgcaaggaccctgttaccgccaacaacgcgtctcaacgacaaccgggcaaaacaacaatagcaactttgcctggactgctgggaccaaataccatctgaatggaagaaattcattggctaatcctggcatcgctatggcaacacacaaagacgacaaggagcgtttttttcccagtaacgggatcctgatttttggcaaacaaaatgctgccagagacaatgcggattacagcgatgtcatgctcaccagcgaggaagaaatcaaaaccactaaccctgtggctacagaggaatacggtatcgtggcagataacttgcagcagcaaaacacggctcctcaaattggaactgtcaacagccagggggccttacccggtatggtctggcagaacctggacgtgtacctgcagggtcccatctgggccaagattcctcacacggacggcaacttccacccgtctccgctgatgggcggctttggcctgaaacatcctccgcctcagatcctgatcaagaacacgcctgtacctgcggatcctccgaccaccttcaaccagtcaaagctgaactctttcatcacgcaatacagcaccggacaggtcagcgtggaaattgaatgggagctgcagaaggaaaacagcaagcgctggaaccccgagatccagtacacctccaactactacaaatctacaagtgtggactttgctgttaatacagaaggcgtgtactctgaaccccaccccattggcacccgttacctcacccgtcccctgtaa

SEQ ID NO: 1024 - DNA, 2214 bp, Artificial Sequence
  source: /note="Description of Artificial Sequence: Synthetic polynucleotide"
atggctgccgatggttatcttccagattggctcgaggacaacctctctgagggcattcgcgagtggtgggcgctgaaacctggagccccgaagcccaaagccaaccagcaaaagcaggacgacggccggggtctggtgcttcctggctacaagtacctcggacccttcaacggactcgacaagggagagcccgtcaacgcggcggacgcagcggccctcgagcacgacaaggcctacgaccagcagctcaaagcgggtgacaatccgtacctgcggtataaccacgccgacgccgagtttcaggagcgtctgcaagaagatacgtcttttgggggcaacctcgggcgagcagtcttccaggccaagaagcgggttctcgaacctctcggtctggttgaggaaggcgctaagacggctcctggaaagaagagaccggtagagccatcaccccagcgttctccagactcctcctcgggcatcggcaagacaggccagcagcccgctaaaaagagactcaattttggtcagactggcgactcagagtcagtccccgacccacaacctctcggagaacctccagcaacccccgctgctgtgggacctactacaatggcttcaggtggtggcgcaccaatggcagacaataacgaaggcgccgacggagtgggtaatgcctcaggaaattggcattgcgattcccaatggctgggcgacagagtcatcaccaccagcacccgaacatgggccttgcccacctataacaaccacctctacaagcaaatctccagtgcttcaacgggggccagcaacgacaaccactacttcggctacagcaccccctgggggtattttgacttcaacagattccactgccacttttcaccacgtgactggcagcgactcatcaacaacaactggggattccggcctaagcgactcaacttcaagctcttcaacattcaggtcaaagaggttacggacaacaatggagtcaagaccatcgccaataaccttaccagcacggtccaggtcttcacggactcagactatcagctcccgtacgtgctcgggtcggctcacgagggctgcctcccgccgttcccagcggacgttttcatgattccccagtacggctacctaacactcaacaacggtagtcaggccgtgggacgctcctccttctactgcctggaatactttccttcgcagatgctgagaaccggcaacaacttccagtttacttacaccttcgaggacgtgcctttccacagcagctacgctcacagccagagcttggaccggctgatgaatcctctgattgaccagtacctgtactacttgtctcggactcaaacaacaggaggcacggcaaatacgcagactttgggcttcagccaaggtgggcctaatacaatggccaatcaggcaaagaactgggtgccaggaccctgttaccgccaacaacgggtttcaacggcaaccgggcaaaacaacaatagcaactttgcctggactgctgggaccaaataccatctgaaaggaagaaattcattggctaatcctggcatcgctatggcaacacacaaagacgacaaggagcgtttttttcccagtaacgggatcctgatttttggcaaacaaaatgctgccagagacaatgcggattacagcgatgtcatgctcaccagcgaggaagaaatcaaaaccactaaccctgtggctacagaggaatacggtatcgtggcagataacttgcagcagcaaaacacggctcctcaaattggaactgtcaacagccagggggccttacccggtatggtctggcagaaccgggacgtgtacctgcagggtcccatctgggccaagattcctcacacggacggcaacttccacccgtctccgctgatgggcggctttggcctgaaacatcctccgcctcagatcctgatcaagaacacgcctgtacctgcggatcctccgaccaccttcaaccagtcaaagctgaactctttcatcacgcaatacagcaccggacaggtcagcgtggaaattgaatgggagctgcagaaggaaaacagcaaacgctggaacccagagattcaatacacttccaactactacaaatctacaagtgtggactttgctgttaatacagaaggcgtgtactctgaaccccaccccattggcacccgttacctcacccgtcccctgtaa

SEQ ID NO: 1025 - DNA, 2214 bp, Artificial Sequence
  source: /note="Description of Artificial Sequence: Synthetic polynucleotide"
  modified_base (676)..(676): a, c, t, or g
  modified_base (697)..(697): a, c, t, or g
  modified_base (715)..(715): a, c, t, or g
  modified_base (748)..(748): a, c, t, or g
  modified_base (750)..(750): a, c, t, or g
  modified_base (757)..(757): a, c, t, or g
  modified_base (763)..(763): a, c, t, or g
atggctgccgatggttatcttccagattggctcgaggacactctctctgaaggaataagacagtggtggaagctcaaacctggcccaccaccaccaaagcccgcagagcggcataaggacgacagcaggggtcttgtgcttcctgggtacaagtacctcggacccttcaacggactcgacaagggagagccggtcaacgaggcagacgccgcggccctcgagcacgacaaagcctacgaccggcagctcgacagcggagacaacccgtacctcaagtacaaccacgccgacgcggagtttcaggagcgccttaaagaagatacgtcttttgggggcaacctcggacgagcagtcttccaggcgaaaaagagggttcttgaacctctcggtctggttgaggaaggcgctaagacggctcctggaaagaaacgtccggtagagcagtcgccacaagagccagactcctcctcgggcatcggcaagacaggccagcagcccgctaaaaagagactcaattttggtcagactggcgactcagagtcagtccccgacccacaacctctcggagaacctccagcaacgccctctggtgtgggacctaatacaatggctgcaggcggtggcgctccaatggcagacaataacgaaggcgccgacggagtgggtagttcctcangaaattggcattgcgattccncatggctgggcgacagantcatcaccaccagcacccgaacctgggccctgncnacctacnacaacnacctctacaagcaaatctccaacagcacatctggaggagccaccaacgacaacacctacttcggctacagcaccccctgggggtattttgactttaacagattccactgccacttttcaccacgtgactggcagcgactcatcaacaacaactggggattccggcctaagcgactcaacttcaagctcttcaacatccaggtcaaggaggtcacgcagaatgaaggcaccaagaccatcgccaataacctcaccagcaccatccaggtgtttacggactcggagtaccagctgccgtacgttctcggctctgcccaccagggctgcctgcctccgttcccggcggacgtgttcatgattccccagtacggctacctaacactcaacaacggtagtcaggccgtgggacgctcctccttctactgcctggaatactttccttcgcagatgctgagaaccggcaacaacttccagtttacttacaccttcgaggacgtgcctttccacagcagctacgcccacagccagagcttggaccggctgatgaatcctctgattgaccagtacctgtactacttgtctcggactcaaacaacaggaggcacggcaaatacgcagactctgggcttcagccaaggtgggcctaatacaatggccaatcaggcaaagaactggctgccaggaccctgttaccgccaacaacgcgtctcaacgacaaccgggcaaaacaacaatagcaactttgcctggactgctgggaccaaataccatctgaatggaagaaattcattggctaatcctggcatcgctatggcaacacacaaagacgacaaggagcgtttttttcccagtaacgggatcctgatttttggcaaacaaaatgctgccagagacaatgcggattacagcgatgtcatgctcaccagcgaggaagaaatcaaaaccactaaccctgtggctacagaggaatacggtatcgtggcagataacttgcagcagcaaaacacggctcctcaaattggaactgtcaacagccagggggccttacccggtatggtttggcagaaccgggacgtgtacctgcagggtcctatctgggccaagattcctcacacggacggaaactttcatccctcgccgctgatgggaggctttggactgaaacacccgcctcctcagatcctgattaagaatacacctgttcccgcggatcctccaactaccttcagtcaagctaagctggcgtcgttcatcacgcaatacagcacaggacaagtgagtgtggaaattgaatgggagctgcagaaagaaaacagcaagcgctggaatcccgaagtgcagtacacatccaattatgcaaaatctgccaacgttgattttactgtggacaacaatggactttatactgagcctcgccccattggcacccgttaccttacccgtcccctgtaa

SEQ ID NO: 1026 - DNA, 2214 bp, Artificial Sequence
  source: /note="Description of Artificial Sequence: Synthetic polynucleotide"
atggctgccgatggttatcttccagattggctcgaggacaacctctctgagggcattcgcgagtggtgggacttgaaacctggagccccgaagcccaaagccaaccagcaaaagcaggacgacggccggggtctggtgcttcctggctacaagtacctcggacccttcaacggactcgacaagggggagcccgtcaacgcggcggacgcagcggccctcgagcacgacaaggcctacgaccagcagctcaaagcgggtgacaatccgtacctgcggtataaccacgccgacgccgagtttcaggagcgtctgcaagaagatacgtcttttgggggcaacctcgggcgagcagtcttccaggccaagaagcgggttctcgaacctctcggtctggttgaggaaggcgctaagacggctcctggaaagaagagaccggtagagccatcaccccagcgttctccagactcctctacgggcatcggcaagaaaggccagcagcccgcgaaaaagagactcaactttgggcagactggcgactcagagtcagtgcccgaccctcaaccaatcggagaaccccccgcaggcccctctggtgtgggatctcttacaatggcttcaggtggtggcgcaccagtggcagacaataacgaaggtgccgatggagtgggtagttcctcgggaaattggcattgcgattcccaatggctgggggacagagtcatcaccaccagcacccgaacatgggccttgcccacctataacaaccacctctacaagcaaatctccagtgcttcaacgggggccagcaacgacaaccactacttcggctacagcaccccctgggggtattttgactttaacagattccactgccacttctcaccacgtgactggcagcgactcatcaacaacaactggggattccggcccaagagactcaacttcaagctcttcaacatccaggtcaaggaggtcacggacaatgatggagtcaagaccatcgccaataaccttaccagcacgattcaggtctttacggactcggaataccagttgccgtacgtcctcggctctgcgcaccagggctgcctgcctccgttcccggcggacgtgttcatgattccgcagtacggctacctaacgctcaacaatggcagccaggcagtgggacggtcatccttttactgcctggaatatttcccatcgcagatgctgagaacgggcaacaactttaccttcagctacacttttgaggacgttcctttccacagcagctacgctcacagccagagtctggaccgtctcatgaatcctctgattgaccagtacctgtactacttgtctcggactcaaacaacaggaggcacggcaaatacgcagactctgggcttcagccaaggtgggcctaatacaatggccaatcacgcaaagaactggctgccaggaccctgttaccgccaacaacgcgtctcaacgacaaccggacaaaacaacaatagcaactttgcctggactgctgggaccaaataccatctgaatggaagaaattcattggctaatcctggcatcgctatggcaacacacaaagacgacaaggagcgtttttttcccagtaacgggatcctgatttttggcaaacaaaatgctgccagagacaatgcggattacagcgatgtcatgctcaccagcgaggaagaaatcaaaaccactaaccctgtggctacagaggaatacggtatcgtggcagataacttgcagcagcaaaacacggctcctcaaattggaactgtcaacagccagggggccttacccggtatggtctggcagaaccgggacgtgtacctgcagggtcccatctgggccaagattcctcacacggacggcaacttccacccgtctccgctgatgggcggctttggcctgaaacatcctccgcctcagatcctgatcaagaacacgcctgtacctgcggatcctccgaccaccttcaaccagtcaaagctgaactctttcatcacgcaatacagcaccggacaggtcagcgtggaaattgaatgggagctgcagaaggaaaacagcaagcgctggaaccccgagatccagtacacctccaactactacaaatctacaagtgtggactttgctgttaatacagaaggcgtgtactctgaaccccaccccattggcacccgttacctcacccgtcccctgtaa

SEQ ID NO: 1027 - DNA, 2211 bp, Artificial Sequence
  source: /note="Description of Artificial Sequence: Synthetic polynucleotide"
atggctgccgatggttatcttccagattggctcgaggacactctctctgaaggaataagacagtggtggaagctcaaacctggcccaccaccaccaaagcccgcagagcggcacaaggacgacagcaggggtcttgtgcttcctgggtacaagtacctcggacccttcaacggactcgacaagggagagccggtcaacgaggcagacgccgcggccctcgagcacgacaaagcctacgaccggcagctcgacagcggagacaacccgtacctcaagtacaaccacgccgacgcggagtttcaggagcgccttaaagaagatacgtcttttgggggcaacctcggacgagcagtcttccaggcgaaaaagagggttcttgaacctctgggcctggttgaggaacctgttaagacggctccgggaaaaaagaggccggtagagcactctcctgtggagccagactcctcctcgggaaccggaaaggcgggccagcagcctgctaaaaagagactcaattttggtcagactggcgactcagagtcagtccccgacccacaacctctcggagaacctccagcaacccccgctgctgtgggacctactacaatggcttcaggtggtggcgcaccaatggcagacaataacgaaggcgccgacggagtgggtaatgcctcaggaaattggcattgcgattccacatggctgggcgacagagtcatcaccaccagcacccgcacctgggccttgcccacctacaataaccacctctacaagcaaatctccagtgcttcaacgggggccagcaacgacaaccactacttcggctacagcaccccctgggggtattttgacttcaacagattccactgccacttctcaccacgtgactggcagcgactcatcaacaacaactggggattccggcccaagagactcaacttcaaactcttcaacatccaagtcaaggaggtcacgcagaatgaaggcaccaagaccatcgccaataacctcaccagcaccatccaggtgtttacggactcggagtaccagctgccgtacgttctcggctctgcccaccagggctgcctgcctccgttcccggcggacgtgttcatgattccccagtacggctacctaacactcaacaacggtagtcaggccgtgggacgctcctccttctactgcctggaatactttccttcgcagatgctgagaaccggcaacaacttccagtttacttacaccttcgaggacgtgcctttccacagcagctacgcgcacagccagagcttggaccggctgatgaatcctctgattgaccagtacctgtactacttgtctcggactcaaacaacaggaggcacggcaaatacgcagactctgggcttcagccaaggtgggcctaatacaatggccaatcaggcaaagaactggctgccaggaccctgttaccgccaacaacgcgtctcaacgacaaccgggcaaaacaacaatagcaactttgcctggactgctgggaccaaataccatctgaatggaagaaattcattggctaatcctggcatcgctatggcaacacacaaagacgacaaggagcgtttttttcccagtaacgggatcctgatttttggcaaacaaaatgctgccagagacaatgcggattacagcgatgtcatgctcaccagcgaggaagaaatcaaaaccactaaccctgtggctacagaggaatacggtatcgtggcagataacttgcagcagcaaaacacggctcctcaaattggaactgtcaacagccagggggccttacccggtatggtctggcagaaccgggacgtgtacctgcagggtcccatctgggccaagattcctcacacggacggcaacttccacccgtctccgctgatgggcggctttggcctgaaacatcctccgcctcagatcctgatcaagaacacgcctgtacctgcggatcctccgaccaccttcaaccagtcaaagctgaactctttcatcacgcaatacagcaccggacaggtcagcgtggaaattgaatgggagctgcagaaggaaaacagcaagcgctggaaccccgagatccagtacacctccaactactacaaatctacaagtgtggactttgctgttaatacagaaggcgtgtactctgaaccccaccccattggcacccgttacctcacccgtcccctgtaa

SEQ ID NO: 1028 - DNA, 2211 bp, Artificial Sequence
  source: /note="Description of Artificial Sequence: Synthetic polynucleotide"
atggctgccgatggttatcttccagattggctcgaggacaacctctctgagggcattcgcgagtggtgggcgctgaaacctggagccccgaagcccaaagccaaccagcaaaagcaggacgacggccggggtctggtgcttcctggctacaagtacctcggacccttcaacggactcgacaagggggagcccgtcaacgcggcggatgcagcggccctcgagcacgacaaggcctacgaccagcagctccaagcgggtgacaatccgtacctgcggtataaccacgccgacgccgagtttcaggagcgtcttcaaggagatacgtcttttgggggcaacctcggacgagcagtcttccaggccaagaagcgggttctcgaacctctcggtctggttgaggaaggcgctaagacggctcctggaaagaaacgtccggtagagcagtcgccacaagagccagactcctcctcgggcatcggcaagacaggccagcagcccgctaaaaagagactcaattttggtcagactggcgactcagagtcagtccccgacccacaacctctcggagaacctccagcaacccccgctgctgtgggacctactacaatggcttcaggcggtggcgcaccaatggcggacaataacgaaggcgccgatggagtgggtaatgcctcaggaaattggcattgcgattccacatggctgggcgacagagtcatcaccaccagcacccgcacctgggccttgcccacctacaataaccacctctacaagcaaatctccagtgcttcaacgggggccagcaacgacaaccactacttcggctacagcaccccctgggggtattttgacttcaacagattccactgccacttctcaccacgtgactggcagcgactcatcaacaacaactggggattccggcctaagcgactcaacttcaagctcttcaacattcaggtcaaagaggttacggacaacaatggagtcaagaccatcgccaataacctcaccagcaccatccaggtgtttacggactcggagtaccagctgccgtacgttctcggctctgcccaccagggctgcctgcctccgttcccggcggacgtgttcatgattccccagtacggctacctaacactcaacaacggtagtcaggccgtgggacgctcctccttctactgcctggaatactttccttcgcagatgctgagaaccggcaacaacttccagtttacttacaccttcgaggacgtgcctttccacagcagctacgcccacagccagagcttggaccggctgatgaatcctctgattgaccagtacctgtactacttgtctcggactcaaacaacaggaggcacggcaaatacgcagactctgggcttcagccaaggtgggcctaatacaatggccaatcaggcaaagaactggctgccaggaccctgttaccgccaacaacgcgtctcaacgacaaccgggcaaaacaacaatagcaactttgcctggactgctgggaccaaataccatctgaatggaagaaattcattggctaatcctggcatcgctatggcaacacacaaagacgacaaggagcgtttttttcccagtaacgggatcctgatttttggcaaacaaaatgctgccagagacaatgcggattacagcgatgtcatgctcaccagcgaggaagaaatcaaaaccactaaccctgtggctacagaggaatacggtatcgtggcagataacttgcagcagcaaaacacggctcctcaaattggaactgtcaacagccagggggccttacccggtatggtctggcagaaccgggacgtgtacctgcagggtcccatctgggccaagattcctcacacggacggcaacttccacccgtctccgctgatgggcggctttggcctgaaacatcctccgcctcagatcctgatcaagaacacgcctgtacctgcggatcctccgaccaccttcaaccagtcaaagctgaactctttcatcacgcaatacagcaccggacaggtcagcgtggaaattgaatgggagctgcagaaggaaaacagcaagcgctggaaccccgagatccagtacacctccaactactacaaatctacaagtgtggactttgctgttaatacagaaggcgtgtactctgaaccccaccccattggcacccgttacctcacccgtcccctgtaa

SEQ ID NO: 1029 - DNA, 2217 bp, Artificial Sequence
  source: /note="Description of Artificial Sequence: Synthetic polynucleotide"
atggctgccgatggttatcttccagattggctcgaggacactctctctgaaggaataagacagtggtggaagctcaaacctggcccaccaccaccaaagcccgcagagcggcataaggacgacagcaggggtcttgtgcttcctgggtacaagtacctcggacccttcaacggactcgacaagggggagcccgtcaacgcggcggatgcagcggccctcgagcacgacaaggcctacgaccagcagctcaaagcgggtgacaatccgtacctgcggtataaccacgccgacgcggagtttcaggagcgccttaaagaagatacgtcttttgggggcaacctcggacgagcagtcttccaggcgaaaaagagggttcttgaacctctcggtctggttgaggaaggcgctaagacggctcctggaaagaagagaccggtagagccatcaccccagcgttctccagactcctctacgggcatcggcaagaaaggccaacagcccgccagaaaaagactcaattttggtcagactggcgactcagagtcagttccagaccctcaacctctcggagaacctccagcagcgccctctggtgtgggacctaatacaatggctgcaggcggtggcgcaccaatggcagacaataacgaaggcgccgacggagtgggtagttcctcgggaaattggcattgcgattcccaatggctgggggacagagtcatcaccaccagcaccagaacctgggccctgcccacctacaacaatcacctctacaagcaaatctccaacagcacatctggaggatcttcaaatgacaacgcctacttcggctacagcaccccctgggggtattttgacttcaaccgcttccactgccacttctcaccacgtgactggcagcgactcatcaacaacaactggggattccggcccaagagactcaacttcaagctcttcaacattcaggtcaaagaggttacggacaacaatggagtcaagaccatcgccaataaccttaccagcacggtccaggtctttacggactcggagtaccagttgccgtacgtcctcggctctgcgcaccagggctgcctccctccgttcccggcggacgtgttcatgattccccagtacggctacctaacactcaacaacggtagtcaggccgtgggacgctcctccttctactgcctggaatatttcccttctcagatgctgagaacgggcaacaactttaccttcagctacacctttgaggacgttcctttccacagcagctacgctcacagccagagtctggaccgtctcatgaatcctctgattgaccagtacctgtactacttgtctcggactcaaacaacaggaggcacggcaaatacgcagactctgggcttcagccaaggtgggcctaatacaatggccaatcaggcaaagaactggctgccaggaccctgttaccgccaacaacgcgtctcaacgacaaccgggcaaaacaacaatagcaactttgcctggactgctgggaccaaataccatctgaatggaagaaattcattggctaatcctggcatcgctatggcaacacacaaagacgacaaggagcgtttttttcccagtaacgggatcctgatttttggcaaacaaaatgctgccagagacaatgcggattacagcgatgtcatgctcaccagcgaggaagaaatcaaaaccactaaccctgtggctacagaggaatacggtatcgtggcagataacttgcagcagcaaaacacggctcctcaaattggaactgtcaacagccagggggccttacccggtatggtctggcagaaccgggacgtgtacctgcagggtcccatctgggcaaagattccacacacggacggacattttcacccctctcccctcatgggtggattcggacttaaacaccctcctccacagattctcatcaagaacaccccggtacctgcgaatcctccgaccaccttcaaccagtcaaagctgaactctttcatcacgcaatacagcacaggacaagtgagtgtggaaattgaatgggagctgcagaaagaaaacagcaagcgctggaatcccgaagtgcagtacacatccaattatgcaaaatctgccaacgttgattttactgtggacaacaatggactttatactgagcctcgccccattggcacccgttaccttacccgtcccctgtaa

SEQ ID NO: 1030 - DNA, 2211 bp, Artificial Sequence
  source: /note="Description of Artificial Sequence: Synthetic polynucleotide"
atggctgccgatggttatcttccagattggctcgaggacaacctctctgagggcattcgcgagtggtgggcgctgaaacctggagccccgaaacccaaagccaaccagcaaaagcaggacgacggccggggtctggtgcttcctggctacaagtacctcggacccttcaacggactcgacaagggggagcccgtcaacgcggcggacgcagcggccctcgagcacgacaaggcctacgaccagcagctcaaggcgggtgacaatccgtacctgcggtataaccacgccgacgccgagtttcaggagcgtctgcaagaagatacgtcttttgggggcaacctcgggcgagcagtcttccaggccaaaaagaggcttcttgaacctcttggtctggttgaggaaggggctaagacggctcctggaaagaaacgtccggtagagcagtcgccacaagagccagactcctcctcgggcattggcaagacaggccagcagcccgctaaaaagagactcaactttgggcagactggcgactcagagtcagtgcccgatcctcaacctctcggagaacctccagcaacccccgctgctgtgggacctactacaatggcttcaggcggtggcgcaccaatggcggacaataacgaaggcgccgatggagtgggtaattcctcgggaaattggcattgcgattccacatggatgggcgacagagtcatcaccaccagcacccgaacctgggccctgcccacctacaacaatcacctctacaagcaaatctccagtgcttcaacgggggccagcaacgacaaccactacttcggctacagcaccccctgggggtattttgatttcaacagattccactgccatttttcaccacgtgactggcagcgactcatcaacaacaactggggattccggcccaagagactcaacttcaagctcttcaacatccaggtcaaggaggtcacgcagaatgaaggcaccaagaccatcgccaataaccttaccagcacgattcaggtctttacggattcggaataccagctcccgtacgtcctcggctctgcgcaccagggctgcctccctccgttcccggcggacgtgttcattattccgcagtacggctacctaacgctcaacaatggtagccaggcagtgggacggtcatccttttactgcctggaatatttcccatcgcagatgctgagaacgggcaacaactttaccttcagctacacctttgaggacgttcctttccacagcagctacgctcacagccagagtctggaccgtctcatgaatcctctgattgaccagtacctgtactacttgtctcggactcaaacaacaggaggcacggcaaatacgcagactctgggcttcagccaaggtgggcctaatacaatggccaatcaggcaaagaactggctgccaggaccctgttaccgccaacaacgcgtctcaacgacaaccgggcaaaacaacaatagcaactttgcctggactgctgggaccaaataccatctgaatggaagaaattcattggctaatcctggcatcgctatggcaacacacaaagacgacaaggagcgtttttttcccagtaacgggatcctgatttttggcaaacaaaatgctgccagagacaatgcggattacagcgatgtcatgctcaccagcgaggaagaaatcaaaaccactaaccctgtggctacagaggaatacggtatcgtggcagataacttgcagcagcaaaacacggctcctcaaattggaactgtcaacagccagggggccttacccggtatggtctggcagaaccgggacgtgtacctgcagggtcccatctgggccaagattcctcacacggacggcaacttccacccgtctccgctgatgggcggctttggcctgaaacatcctccgcctcagatcctgatcaagaacacgccagtacctgcggatcctccgaccaccttcaaccagtcaaagctgaactctttcatcacgcaatacagcaccggacaggtcagcgtggaaattgaatgggagctgcagaaggaaaacagcaagcgctggaaccccgagatccagtacacctccaactactacaaatctacaagtgtggactttgctgttaatacagaaggcgtgtactctgaaccccaccccattggcacccgttacctcacccgtcccctgtaa

SEQ ID NO: 1031 - DNA, 2211 bp, Artificial Sequence
  source: /note="Description of Artificial Sequence: Synthetic polynucleotide"
atggctgccgatggttatcttccagattggctcgaggacaacctctctgagggcattcgcgagtggtgggcgctgaaacctggagccccgaaacccaaagccaaccagcaaaagcaggacgacggccggggtctggtgcttcctggctacaagtacctcggacccttcaacggactcgacaagggggagcccgtcaacgcggcggatgcagcggccctcgagcacgacaaggcctacgaccagcagctcaaggcgggtgacaatccgtacctgcggtataaccacgccgacgccgagtttcaggagcgtctgcaagaagatacgtcttttgggggcaacctcgggcgagcagtcttccaggccaaaaagagggttcttgaaccttttggtctggttgaggaagctgctaagacggctcctggaaagaaacgtccggtagagcagtcgccacaagagccagactcctcctcgggcattggcaagacaggccagcagcccgctaaaaagagactcaattttggtcagactggcgactcagagtcagtgcccgaccctcaacctctcggagaacctccagcaacccccgctgctgtgggacctactacaatggcttcaggcggtggcgcaccaatggcagacaataacgaaggcgccgatggagtgggtaatgcctcaggaaattggcattgcgattccacatggctgggcgacagagtcatcaccaccagcacccgaacctgggccctgcccacctacaacaatcacctctacaagcaaatctccagtgcttcaacgggggccagcaacgacaaccactacttcggctacagcaccccctgggggtattttgactttaacagattccactgccacttttcaccacgtgactggcagcgactcatcaacaacaactggggattccggcccaagagactcaacttcaagctcttcaacatccaggtcaaggaggtcacgcagaatgaaggcaccaagaccatcgccaataacctcaccagcaccattcaggtctttacggattcggaataccagctcccgtacgtcctcggctctgcccaccagggctgcctccctccgttcccggcggacgtgttcatgattccgcagtacggctacctaacgctcaacaatggtagccaggcagtgggacggtcatccttttactgcctggaatatttcccatcgcagatgctgagaacgggcaacaactttaccttcagctacacctttgaggacgttcctttccacagcagctacgctcacagccagagtctggaccgtctcatgaatcctctgattgaccagtacctgtactacttgtctcggactcaaacaacaggaggcacggcaaatacgcagactctgggcttcagccaaggtgggcctaatacaatggccaatcacgcaaagaactggctgccaggaccctgttaccgccaacaacgcgtctcaacgacaaccgggcaaaacaacaatagcaactttgcctggactgctgggaccaaataccatctgaatggaagaaattcattggctaatcctggcatcgctatggcaacacacaaagacgacaaggagcgtttttttcccagtaacgggatcctgatttttggcaaacaaaatgctgccagagacaatgcggattacagcgatgtcatgctcaccagcgaggaagaaatcaaaaccactaaccctgtggctacagaggaatacggtatcgtggcagataacttgcagcagcaaaacacggctcctcaaattggaactgtcaacagccagggggccttacccggtatggtctggcagaaccgggacgtgtacctgcagggtcccatctgggccaagattcctcacacggacggcaacttccacccgtctccgctgatgggcggctttggcctgaaacatcctccgcctcagatcctgatcaagaacacgcctgtacctgcggatcctccgaccaccttcaaccagtcaaagctgaactctttcatcacgcaatacagcaccggacaggtcagcgtggaaattgaatgggagctgcagaaggaaaacagcaagcgctggaaccccgagatccagtacacctccaactactacaaatctacaagtgtggactttgctgttaatacagaaggcgtgtactctgaaccccaccccattggcacccgttacctcacccgtcccctgtaa

SEQ ID NO: 1032 - DNA, 2211 bp, Artificial Sequence
  source: /note="Description of Artificial Sequence: Synthetic polynucleotide"
atggctgccgatggttatcttccagattggctcgaggacaacctctctgagggcattcgcgagtggtgggcgctgaaacctggagccccgaagcccaaagccaaccagcaaaagcaggacgacggccggggtctggtgcttcctggctacaagtacctcggacccttcaacggactcgacaaaggagagcccgtcaacgaggcggacgcggcggccctcgaacacgacaaggcttacgaccagcagctcaaggccggtgacaacccctacctgcggtacaaccacgccgacgccgagttccaggagcggctgcaagaagatacgtcttttgggggcaacctcgggcgagcagtcttccaggccaagaagaggcttcttgaacctcttggtctggttgaggaagcggctaagacggctcctggaaagaagaggcctgtagagcagtctcctcaggaaccggactcctccgcgggtattggcaaatcaggtgcacagcccgctaaaaagagactcaattttggtcagactggcgactcagagtcagtccccgacccacaacctctcggagaacctccagcaacccccgctgctgtgggacctactacaatggcttcaggcggtggcgcaccaatggcagacaataacgaaggcgccgatggagtgggtaatgcctcaggaaattggcattgcgattccacatggctgggcgacagagtcatcaccaccagcacccgaacctgggccctgcccacctataacaaccatctctacaagcaaatctccagtgcttcaacgggggccagtaacgacaaccactacttcggctacagcaccccctgggggtattttgactttaacagattccactgccacttctcaccacgtgactggcagcgactcatcaacaacaactggggattccggcccaagcgactcaacttcaagctcttcaacattcaggtcaaagaggttacggacaacgatggagtcaagaccatcgccaataaccttaccagcaccattcaggtgtttacggactcggaataccagctgccgtacgttctcggctccgcccaccagggctgcctgcctccgttcccggcggacgtgttcatgattccccagtacggctacctaacactcaacaacggtagtcaggccgtgggacgctcctccttctactgcctggaatactttccttcgcagatgctgagaactggcaacaacttccagtttacttacaccttcgaggacgtgcctttccacagcagctacgcccacagccagagcttggaccggctgatgaatcctctgattgaccagtacctgtactacttgtctcggactcaaacaacaggaggcacggcaaatacgcagactctgggcttcagccaaggtgggcctaatacaatggccaatcaggcaaagaactggctgccaggaccctgttaccgccaacaacgcgtctcaacgacaaccgggcaaaacaacaatagcaactttgcctggactgctgggaccaaataccatctgaatggaagaaattcattggctaatcctggcatcgctatggcaacacacaaagacgacaaggagcgtttttttcccagtaacgggatcctgatttttggcaaacaaaatgctgccagagacaatgcggattacagcgatgtcatgctcaccagcgaggaagaaatcaaaaccactaaccctgtggctacagaggaatacggtatcgtggcagataacttgcagcagcaaaacacggctcctcaaattggaactgtcaacagccagggggccttacccggtatggtctggcagaaccgggacgtgtacctgcagggtcccatctgggccaagattcctcacacggacggcaacttccacccgtctccgctgatgggcggctttggcctgaaacatcctccgcctcagatcctgatcaagaacacgcctgtacctgcggatcctccgaccaccttcaaccagtcaaagctgaactctttcatcacgcaatacagcaccggacaggtcagcgtggaaattgaatgggagctgcagaaggaaaacagcaagcgctggaaccccgagatccagtacacctccaactactacaaatctacaagtgtggactttgctgttaatacagaaggcgtgtactctgaaccccaccccattggcacccgttacctcacccgtcccctgtaa

SEQ ID NO: 1033 - DNA, 2211 bp, Artificial Sequence
  source: /note="Description of Artificial Sequence: Synthetic polynucleotide"
atggctgccgatggttatcttccagattggctcgaggacaacctctctgagggcattcgcgagtggtgggcgctgaaacctggagccccgaagcccaaagccaaccagcaaaagcaggacgacggccggggtctggtgcttcctggctacaagtacctcggacccttcaacggactcgacaagggggagcccgtcaacgcggcggatgcagcggccctcgagcacgacaaagcctacgaccagcagctcaaagcgggtgacaatccgtacctgcggtataaccacgccgacgccgagtttcaggagcgtctgcaagaagatacgtcttttgggggcaacctcgggcgagcagtcttccaggccaagaagagggttctcgaacctttgggtctggttgaggaaggggctaagacggctcctggaaagaaaaggccggtagagcagtctcctcaggaaccggactcctccgcgggtattggcaagacaggtgcacagcccgctaaaaagagactcaattttggtcagactggcgactcagagtcagtccccgacccacaacctctcggagaacctccagcaacccccgctgctgtgggacctactacaatggcttcaggcggtggcgcaccaatggcagacaataacgaaggcgccgacggagtgggtagtgcctcgggaaattggcattgcgattccacatggctgggcgacagagtcatcaccaccagcacccgaacctgggccctgcccacctataacaaccatctctacaagcaaatctccagtgcttcaacgggggccagtaacgacaaccactacttcggctacagcaccccctgggggtattttgacttcaacagattccactgccacttctcaccacgtgactggcagcgactcatcaacaacaactggggattccggcccaagcgactcaacttcaagctcttcaacattcaggtcaaagaggttacggacaacaatggagtcaagaccatcgccaataaccttaccagcacgatccaggtctttacggactcggagtaccagctgccgtacgtcctcggctctgcgcaccagggctgcctgcctccgttcccggcggacgtgttcatgattccgcagtacggctacctaacgctcaacaatggtagccaggcagtgggacggtcatccttttactgcctggaatatttcccatcgcagatgctgagaacgggcaacaactttaccttcagctacacctttgaggacgttcctttccacagcagctacgctcacagccagagtctggaccgtctcatgaatcctctgattgaccagtacctgtactacttgtctcggactcaaacaacaggaggcacggcaaatacgcagactctgggcttcagccaaggtgggcctaatacaatggccaatcaggcaaagaactggctgccaggaccctgttaccgccaacaacgcgtctcaacgacaaccgggcaaaacaacaatagcaactttgcctggactgctgggaccaaataccatctgaatggaagaaattcattggctaatcctggcatcgctatggcaacacacaaagacgacaaggagcgtttttttcccagtaacgggatcctgatttttggcaaacaaaatgctgccagagacaatgcggattacagcgatgtcatgctcaccagcgaggaagaaatcaaaaccactaaccctgtggctacagaggaatacggtatcgtggcagataacttgcagcagcaaaacacggctcctcaaattggaactgtcaacagccagggggccttacccggtatggtctggcagaaccgggacgtgtacctgcagggtcccatctgggccaagattcctcacacggacggcaacttccacccgtctccgctgatgggcggctttggcctgaaacatcctccgcctcagatcctgatcaagaacacgcctgtacctgcggatcctccgaccaccttcaaccagtcaaagctgaactctttcatcacgcaatacagcaccggacaggtcagcgtggaaattgaatgggagctgcagaaggaaaacagcaagcgctggaaccccgagatccagtacacctccaactactacaaatctacaagtgtggactttgctgttaatacagaaggcgtgtactctgaaccccaccccattggcacccgttacctcacccgtcccctgtaa

SEQ ID NO: 1034 - DNA, 2211 bp, Artificial Sequence
  source: /note="Description of Artificial Sequence: Synthetic polynucleotide"
atggctgccgatggttatcttccagattggctcgaggacaacctctctgagggcattcgcgagtggtgggacttgaaacctggagccccgaagcccaaagccaaccagcaaaagcaggacgacggccggggtctggtgcttcctggctacaagtacctcggacccttcaacggactcgacaagggggagcccgtcaacgcggcggacgcagcggccctcgagcacgacaaggcctacgaccagcagctcaaagcgggtgacaatccgtacctgcggtataaccacgccgacgccgagtttcaggagcgtctgcaagaagatacgtcttttgggggcaacctcggacgagcagtcttccaggccaaaaagaggcttcttgaacctcttggtctggttgaggaagcggctaagacggctcctggaaagaagaggcctgtagagcagtctcctcaggaaccggactcctccgcgggtattggcaaatcgggtgcacagcccgctaaaaagagactcaatttcggtcagactggcgacacagagtcagtcccagaccctcaaccaatcggagaacctccagcagcgccctctggtgtgggacctaatacaatggctgcaggcggtggcgcaccaatggcagacaataacgaaggtgccgatggagtgggtagttcctcgggaaattggcattgcgattcccaatggctgggggacagagtcatcaccaccagcacccgaacctgggccctgcccacctataacaaccacctctacaagcaaatctccagtgcttcaacgggggccagcaacgacaaccactactttggctacagcaccccttgggggtattttgacttcaacagattccactgccacttttcaccacgtgactggcaaagactcatcaacaacaactggggattccgacccaagagactcaacttcaagctcttcaacatccaggtcaaggaggtcacgcagaatgaaggcaccaagaccatcgccaataacctcaccagcaccatccaggtgtttacggactcggagtaccagctgccgtacgttctcggctctgcccaccagggctgcctgcctccgttcccggcggacgtgttcatgattccccagtacggctacctaacactcaacaacggtagtcaggccgtgggacgctcctccttctactgcctggaatactttccttcgcagatgctgagaaccggcaacaacttccagtttacttacaccttcgaggacgtgcctttccacagcagctacgcgcacagccagagcttggaccggctgatgaatcctctgattgaccagtacctgtactacttgtctcggactcaaacaacaggaggcacggcaaatacgcagactctgggcttcagccaaggtgggcctaatacaatggccaatcacgcaaagaactggctgccaggaccctgttaccgccaacaacgcgtctcaacgacaaccgggcaaaacaacaatagcaactttgcctggactgctgggaccaaataccatctgaatggaagaaattcattggctaatcctggcatcgctatggcaacacacaaagacgacaaggagcgtttttttcccagtaacgggatcctgatttttggcaaacaaaatgctgccagagacaatgcggattacagcgatgtcatgctcaccagcgaggaagaaatcaaaaccactaaccctgtggctacagaggaatacggtatcgtggcagataacttgcagcagcaaaacacggctcctcaaattggaactgtcaacagccagggggccttacccggtatggtctggcagaaccgggacgtgtacctgcagggtcccatctgggccaagattcctcacacggacggcaacttccacccgtctccgctgatgggcggctttggcctgaaacatcctccgcctcagatcctgatcaagaacacgcctgtacctgcggatcctccgaccaccttcaaccagtcaaagctgaactctttcatcacgcaatacagcaccggacaggtcagcgtggaaattgaatgggagctgcagaaggaaaacagcaagcgctggaaccccgagatccagtacacctccaactactacaaatctacaagtgtggactttgctgttaatacagaaggcgtgtactctgaaccccaccccattggcacccgttacctcacccgtcccctgtaa

SEQ ID NO: 1035 - DNA, 2214 bp, Artificial Sequence
  source: /note="Description of Artificial Sequence: Synthetic polynucleotide"
atggctgccgatggttatcttccagattggctcgaggacaaccttagtgaaggaattcgcgagtggtgggcgctgaaacctggagccccgaagcccaaagccaaccagcaaaagcaggacgacggccggggtctggtgcttcctggctacaagtacctcggacccttcaacggactcgacaagggggagcccgtcaacgcggcggacgcagcggccctcgagcacgacaaggcctacgaccagcagctcaaagcgggtgacaatccgtacctgcggtataaccacgccgacgccgagtttcaggagcgtctgcaagaagatacgtcttttgggggcaacctcgggcgagcagtcttccaggccaagaagcgggttctcgaacctctcggtctggttgaggaaggcgctaagacggctcctggaaagaaacgtccggtagagcagtcgccacaagagccagactcctcctcgggcatcggcaagacaggccagcagcccgctaaaaagagactcaatttcggtcagactggcgacacagagtcagtcccagaccctcaaccaatcggagaacctcccgcagccccctcaggtgtgggatctcttacaatggcttcaggtggtggcgcaccagtggcagacaataacgaaggtgccgatggagtgggtagttcctcgggaaattggcattgcgattcccaatggctgggggacagagtcatcaccaccagcaccagaacctgggccttgcccacctacaataaccacctctacaagcaaatctccaacagcacatctggaggatcttcaaatgacaacgcctacttcggctacagcaccccctgggggtattttgactttaacagattccactgccacttttcaccacgtgactggcagcgactcatcaacaacaactggggattccgacccaagagactcaacttcaagctcttcaacatccaggtcaaggaggtcacgcagaacgaaggcaccaagaccatcgccaataacctcaccagcaccatccaggtgtttacggactcggagtaccagctgccgtacgttctcggctccgcccaccagggctgcctgcctccgttcccggcggacgtgttcatgattccccagtacggctacctaacgctcaacaacggtagtcaggccgtgggacgctcctccttctactgcctggaatactttccttcgcagatgctgagaaccggcaacaacttccagtttacttacaccttcgaggacgtgcctttccacagcagctacgcgcacagccagagcttggaccggctgatgaatcctctgattgaccagtacctgtactacttgtctcggactcaaacaacaggaggcacggcaaatacgcagactctgggcttcagccaaggtgggcctaatacaatggccaatcaggcaaagaactggctgccaggaccctgttaccgccaacaacgcgtctcaacgacaaccgggcaaaacaacaatagcaactttgcctggactgctgggaccaaataccatctgaatggaagaaattcattggctaatcctggcatcgctatggcaacacacaaagacgacaaggagcgtttttttcccagtaacgggatcctgatttttggcaaacaaaatgctgccagagacaatgcggattacagcgatgtcatgctcaccagcgaggaagaaatcaaaaccactaaccctgtggctacagaggaatacggtatcgtggcagataacttgcagcagcaaaacacggctcctcaaattggaactgtcaacagccagggggccttacccggtatggtctggcagaaccgggacgtgtacctgcagggtcccatctgggccaagattcctcacacggacggcaacttccacccgtctccgctgatgggcggctttggcctgaaacatcctccgcctcagatcctgatcaagaacacgcctgtacctgcggatcctccgaccaccttcaaccagtcaaagctgaactctttcatcacgcaatacagcaccggacaggtcagcgtggaaattgaatgggagctgcagaaggaaaacagcaagcgctggaaccccgagatccagtacacctccaactactacaaatctacaagtgtggactttgctgttaatacagaaggcgtgtactctgaaccccaccccattggcacccgttacctcacccgtcccctgtaa

SEQ ID NO: 1036 - DNA, 2214 bp, Artificial Sequence
  source: /note="Description of Artificial Sequence: Synthetic polynucleotide"
atggctgccgatggttatcttccagattggctcgaggacaaccttagtgaaggaattcgcgagtggtgggcgctgaaacctggagccccgaagcccaaagccaaccagcaaaagcaggacgacggccggggtctggtgcttcctggctacaagtacctcggacccttcaacggactcgacaagggggagcccgtcaacgcggcggacgcagcggccctcgagcacgacaaggcctacgaccagcagctcaaagcgggtgacaatccgtacctgcggtataaccacgccgacgcggagtttcaggagcgccttaaagaagatacgtcttttgggggcaacctcgggcgagcagtcttccaggccaagaagagggttctcgaaccttttggtctggttgaggaaggtgctaagacggctcctggaaagaaacgtccggtagagcagtcgccacaagagccagactcctcctcgggcatcggcaagacaggccagcagcccgctaaaaagagactcaattttggtcagactggcgactcagagtcagttccagaccctcaacctctcggagaacctccagcagcgccctctggtgtgggacctaatacaatggctgcaggcggtggcgcaccaatggcagacaataacgaaggtgccgatggagtgggtagttcctcgggaaattggcattgcgattcccaatggctggggaacagagtcatcaccaccagcacccgaacctgggccctgcccacctacaacaatcacctctacaagcaaatctccaacagcacatctggaggatcttcaaatgacaacgcctacttcggctacagcaccccctgggggtattttgacttcaacagattccactgccacttctcaccacgtgactggcagcgactcatcaacaacaactggggattccggcccaagagactcaacttcaagctcttcaacattcaggtcaaagaggttacggacaacaatggagtcaagaccatcgccaataaccttaccagcacggtccaggtcttcacggactcggagtaccagttgccgtacgtcctcggctctgcgcaccagggctgcctccctccgttcccggcggacgtgttcatgattccgcaatacggctacctgacgctcaacaacggtagccaagccgtgggacgttcatccttttactgcctggaatatttcccttctcagatgctgagaaccggcaacaacttccagtttacttacaccttcgaggacgtgcctttccacagcagctacgcgcacagccagagcttggaccggctgatgaatcctctgattgaccagtacctgtactacttgtctcggactcaaacaacaggaggcacggcaaatacgcagactctgggcttcagccaaggtgggcctaatacaatggccaatcaggcaaagaactggctgccaggaccctgttaccgccaacaacgcgtctcaacgacaaccgggcaaaacaacaatagcaactttgcctggactgctgggaccaaataccatctgaatggaagaaattcattggctaatcctggcatcgctatggcaacacacaaagacgacaaggagcgtttttttcccagtaacgggatcctgatttttggcaaacaaaatgctgccagagacaatgcggattacagcgatgtcatgctcaccagcgaggaagaaatcaaaaccactaaccctgtggctacagaggaatacggtatcgtggcagataacttgcagcagcaaaacacggctcctcaaattggaactgtcaacagccagggggccttacccggtatggtctggcagaaccgggacgtgtacctgcagggtcccatctgggccaagattcctcacacggacggcaacttccacccgtctccgctgatgggcggctttggcctgaaacatcctccgcctcagatcctgatcaagaacacgcctgtacctgcggatcctccgaccaccttcaaccagtcaaagctgaactctttcatcacgcaatacagcaccggacaggtcagcgtggaaattgaatgggagctgcagaaggaaaacagcaagcgctggaaccccgagatccagtacacctccaactactacaaatctacaagtgtggactttgctgttaatacagaaggcgtgtactctgaaccccaccccattggcacccgttacctcacccgtcccctgtaa

SEQ ID NO: 1037 - DNA, 2211 bp, Artificial Sequence
  source: /note="Description of Artificial Sequence: Synthetic polynucleotide"
atggctgccgatggttatcttccagattggctcgaggacaacctctctgagggcattcgcgagtggtgggacttgaaacctggagccccgaagcccaaagccaaccagcaaaagcaggacgacggccggggtctggtgcttcctggctacaagtacctcggacccttcaacggactcgacaggggggagcccgtcaacgcggcggacgcagcggccctcgagcacgacaaggcctacgaccagcagctcaaagcgggtgacaatccgtacctgcggtataaccacgccgacgccgagtttcaggagcgtctgcaagaagatacgtcttttgggggcaacctcgggcgagcagtcttccaggccaagaagcgggttctcgaacctctcggtctggttgaggaaggcgctaagacggctcctggaaagaaacgtccggtagagcagtcgccacaagagccagactcctcctcgggcatcggcaagacaggccagcagcccgctaaaaagagactcaattttggtcagactggcgactcagagtcagtccccgacccacaacctctcggagaacctccagcaacccccgctgctgtgggacctactacaatggcttcaggcggtggcgcaccaatggcagacaataacgaaggcgccgacggagtgggtaatgcctcaggaaattggcattgcgattccacatggctgggcgacagagtcatcaccaccagcacccgaacctgggccttgcccacctataacaaccacctctacaagcaaatctccagtgcttcaacgggggccagcaacgacaaccactacttcggctacagcaccccctgggggtattttgacttcaacagattccactgccacttctcaccacgtgactggcagcgactcatcaacaacaactggggattccggcctaagcgactcaacttcaagctcttcaacattcaggtcaaagaggttacggacaacaatggagtcaagaccatcgccaataacctcaccagcaccatccaggtgtttacggactcggagtaccagctgccgtacgttctcggctctgcccaccagggctgcctgcctccgttcccggcggacgtgttcatgattccccagtacggctacctaacactcaacaacggtagtcaggccgtgggacgctcctccttctactgcctggaatactttccttcgcagatgctgagaaccggcaacaacttccagtttacttacaccttcgaggacgtgcctttccacagcagctacgcccacagccagagcttggaccggctgatgaatcctctgattgaccagtacctgtactacttgtctcggactcaaacaacaggaggcacggcaaatacgcagactctgggcttcagccaaggtgggcctaatacaatggccaatcaggcaaagaactggctgccaggaccctgttaccgccaacaacgcgtctcaacgacaaccgggcaaaacaacaatagcaactttgcctggactgctgggaccaaataccatctgaatggaagaaattcattggctaatcctggcatcgctatggcaacacacaaagacgacaaggagcgtttttttcccagtaacgggatcctgatttttggcaaacaaaatgctgccagagacaatgcggattacagcgatgtcatgctcaccagcgaggaagaaatcaaaaccactaaccctgtggctacagaggaatacggtatcgtggcagataacttgcagcagcaaaacacggctcctcaaattggaactgtcaacagccagggggccttacccggtatggtctggcagaaccgggacgtgtacctgcagggtcccatctgggccaagattcctcacacggacggcaacttccacccgtctccgctgatgggcggctttggcctgaaacatcctccgcctcagatcctgatcaagaacacgcctgtacctgcggatcctccgaccaccttcaaccagtcaaagctgaactctttcatcacgcaatacagcaccggacaggtcagcgtggaaattgaatgggagctgcagaaggaaaacagcaagcgctggaaccccgagatccagtacacctccaactactacaaatctacaagtgtggactttgctgttaatacagaaggcgtgtactctgaaccccaccccattggcacccgttacctcacccgtcccctgtaa

SEQ ID NO: 1038 - DNA, 2211 bp, Artificial Sequence
  source: /note="Description of Artificial Sequence: Synthetic polynucleotide"
atggctgccgatggttatcttccagattggctcgaggacaacctctctgagggcattcgcgagtggtgggacttgaaacctggagccccgaagcccaaagccaaccagcaaaagcaggacgacggccggggtctggtgcttcctggctacaagtacctcggacccttcaacggactcgacaagggggagcccgtcaacgcggcggacgcagcggccctcgagcacgacaaggcctacgaccagcagctcaaagcgggtgacaatccgtacctgcggtataaccacgccgacgccgagtttcaggagcgtctgcaagaagatacgtcttttgggggcaacctcgggcgagcagtcttccaggccaagaagcgggttctcgaacctctcggtctggttgaggaaggcgctaagacggctcctggaaagaaacgtccggtagagcagtcgccacaagagccagactcctcctcgggcatcggcaagaaaggccaacagcccgccagaaaaagactcaattttggtcagactggcgactcagagtcagttccagaccctcaacctctcggagaacctcccgcagccccctcaggtgtgggatctcttacaatggcttcaggcggtggcgcaccaatggcagacaataacgaaggcgccgacggagtgggtaatgcctcaggaaattggcattgcgattccacatggctgggcgacagagtcatcaccaccagcacccgaacatgggccttgcccacttacaacaaccatctctacaagcaaatctccagtgcttcaacgggggccagcaacgacaaccactacttcggctacagcaccccctgggggtattttgatttcaacagattccactgccacttttcaccacgtgactggcaaagactcatcaacaacaactggggattccgacccaagagactcaacttcaagctctttaacattcaagtcaaagaggtcacgcagaatgaaggcaccaagaccatcgccaataaccttaccagcacggtccaggtcttcacggactcagactatcagctcccgtacgttctcggctccgcccaccagggctgcctgcctccgttcccggcggacgtgttcatgattccccagtacggctacctaacactcaacaacggtagtcaggccgtgggacgctcctccttctactgcctggaatactttccttcgcagatgctgagaaccggcaacaacttccagtttacttacacctttgaggacgttcctttccacagcagctacgctcacagccagagtctggaccgtctcatgaatcctctgattgaccagtacctgtactacttgtctcggactcaaacaacaggaggcacggcaaatacgcagactctgggcttcagccaaggtgggcctaatacaatggccaatcaggcaaagaactggctgccaggaccctgttaccgccaacaacgcgtctcaacgacaaccgggcaaaacaacaatagcaactttgcctggactgctggaaccaaataccatctgaatggaagaaattcattgtctaatcctggcatcgctatggcgacacacaaagacgacaaggagcgtttttttcccagtaacgggatcctgatttttggcaaacaaaatgctgccagagacaatgcggattacagcgatgtcatgctcaccagcgaggaagaaatcaaaaccactaaccctgtggctacagaggaatacggtatcgtggcagataacttgcagcagcaaaacacggctcctcaaattggaactgtcaacagccagggggccttacccggtatggtctggcagaaccgggacatgtacctgcagggtcccatctgggccaagattcctcacacggacggcaacttccacccgtctccgctgatgggcggctttggcctgaaacatcctccgcctcagatcctgatcaagaacacgcctgtacctgcggatcctccgaccaccttcaaccagtcaaagctgaactctttcatcacgcaatacagcaccggacaggtcagcgtggaaattgaatgggagctgcagaaggaaaacagcaagcgctggaaccccgagatccagtacacctccaactactacaaatctacaagtgtggactttgctgttaatacagaaggcgtgtactctgaaccccaccccattggcacccgttacctcacccgtcccctgtaa

SEQ ID NO: 1039 - DNA, 2211 bp, Artificial Sequence
  source: /note="Description of Artificial Sequence: Synthetic polynucleotide"
atggctgccgatggttatcttccagattggctcgaggacaacctctctgagggcattcgcgagtggtgggcgctgaaacctggagccccgaagcccaaagccaaccagcaaaagcaggacgacggccggggtctggtgcttcctggctacaagtacctcggacccttcaacggactcgacaagggggagcccgtcaacgcggcggatgcagcggccctcgagcacgacaaggcctacgaccagcagctcaaagcgggtgacaatccgtacctgcggtataaccacgccgacgccgagtttcaggagcgtctgcaggaagatacgtcttttgggggcaacctcgggcgagcagtcttccaggccaagaagagggttctcgaaccttttggtctggttgaggaaggcgctaagacggctcctggaaagaaacgtccggtagagcagtcgccacaagagccagactcctcctcgggcatcggcaagacaggccagcagcccgctaaaaagagactcaattttggtcagactggcggctcagagtcagtccccgacccacaacctctcggagaacctccagcaacccccgctgctgtgggacctactacaatggctgcaggcggtggcgcaccaatggcagacaataacgaaggcgccgacggagtgggtagttcctcgggaaattggcattgcgattccacatggctgggcgacagagtcatcaccaccagcaccagaacctgggccttgcccacctataacaaccacctctacaagcaaatctccagtgcttcaacgggggccagcaacgacaaccactacttcggctacagcaccccctgggggtattttgatttcaacagattccactgccatttctcaccacgtgactggcagcgactcatcaacaacaactggggattccggcccaagagactcaacttcaaactcttcaacattcaggtcaaagaggttacggacaacaatggagtcaagaccatcgccaataaccttaccagcacggtccaggtgtttacggactcggagtaccagctgccgtacgttctcggctctgcccaccagggctgcctccctccgttcccggcggacgtgttcatgattccgcagtacggctacctaacgctcaacaatggcagccaggcagtgggacggtcatccttttactgcctggaatatttcccttctcagatgctgagaacgggcaacaactttaccttcagctacacctttgaggaagtgcctttccacagcagctacgcgcacagccagagcctggaccggctgatgaatcctctgattgaccagtacctgtactacttgtctcggactcaaacaacaggaggcacggcaaatacgcagactctgggcttcagccaaggtgggcctaatacaatggccaatcaggcaaagaactggctgccaggaccctgttaccgccaacaacgcgtctcaacgacaaccgggcaaaacaacaatagcaactttgcctggactgctgggaccaaataccatctgaatggaagaaattcattggctaatcctggcatcgctatggcctcacacaaagacgacaaggagcgtttttttcccagtaacgggatcctgatttttggcaaacaaaatgctgccagagacaatgcggattacagcgatgtcatgctcaccagcgaggaagaaatcaaaaccactaaccctgtggctacagaggaatacggtatcgtggcagataacttgcagcagcaaaacacggctcctcaaattggaactgtcaacagccagggggccttacccggtatggtctggcagaaccgggacgtgtacctgcagggtcccatctgggccaagattcctcacacggacggcaacttccacccgtctccgctgatgggcggctttggcctgaaacatcctccgcctcagatcctgatcaagaacacgcctgtacctgcggatcctccgaccaccttcaaccagtcaaagctgaactctttcatcacgcaatacagcaccggacaggtcagcgtggaaattgaatgggagctgcagaaggaaaacagcaagcgctggaaccccgagatccagtacacctccaactactacaaatctacaagtgtggactttgctgttaatacagaaggcgtgtactctgaaccccaccccattggcacccgttacctcacccgtcccctgtaa

SEQ ID NO: 1040 - protein, 736 aa, Artificial Sequence
  source: /note="Description of Artificial Sequence: Synthetic polypeptide"
MAADGYLPDWLEDTLSEGIRQWWKLKPGPPPPKPAERHKDDSRGLVLPGYKYLGPFNGLDKGEPVNEADAAALEHDKAYDQQLKAGDNPYLKYNHADAEFQERLKEDTSFGGNLGRAVFQAKKRVLEPLGLVEEGAKTAPGKKRPVEQSPQEPDSSSGIGKTGQQPAKKRLNFGQTGDSESVPDPQPLGEPPATPAAVGPTTMASGGGAPMADNNEGADGVGSSSGNWHCDSQWLGDRVITTSTRTWALPTYNNHLYKQISSASTGASNDNHYFGYSTPWGYFDFNRFHCHFSPRDWQRLINNNWGFRPKRLNFKLFNIQVKEVTQNEGTKTIANNLTSTIQVFTDSEYQLPYVLGSAHQGCLPPFPADVFMIPQYGYLTLNNGSQAVGRSSFYCLEYFPSQMLRTGNNFQFTYTFEDVPFHSSYAHSQSLDRLMNPLIDQYLYYLSRTQTTGGTANTQTLGFSQGGPNTMANQAKNWLPGPCYRQQRVSTTTGQNNNSNFAWTAGTKYHLNGRNSLANPGIAMATHKDDKERFFPSNGILIFGKQNAARDNADYSDVMLTSEEEIKTTNPVATEEYGIVADNLQQQNTAPQIGTVNSQGALPGMVWQNRDVYLQGPIWAKIPHTDGNFHPSPLMGGFGLKHPPPQILIKNTPVPADPPTTFNQSKLNSFITQYSTGQVSVEIEWELQKENSKRWNPEIQYTSNYYKSTSVDFAVNTEGVYSEPHPIGTRYLTRPL

SEQ ID NO: 1041 - protein, 736 aa, Artificial Sequence
  source: /note="Description of Artificial Sequence: Synthetic polypeptide"
MAADGYLPDWLEDNLSEGIREWWALKPGAPKPKANQQKQDDGRGLVLPGYKYLGPFNGLDKGEPVNAADAAALEHDKAYDQQLKAGDNPYLKYNHADAEFQERLKEDTSFGGNLGRAVFQAKKRLLEPLGLVEEAAKTAPGKKRPVEQSPQEPDSSAGIGKSGAQPAKKRLNFGQTGDSESVPDPQPLGEPPATPAAVGPTTMASGGGAPMADNNEGADGVGNASGNWHCDSTWLGDRVITTSTRTWALPTYNNHLYKQISSASTGASNDNHYFGYSTPWGYFDFNRFHCHFSPRDWQRLINNNWGFRPKRLNFKLFNIQVKEVTQNEGTKTIANNLTSTIQVFTDSEYQLPYVLGSAHQGCLPPFPADVFMIPQYGYLTLNNGSQAVGRSSFYCLEYFPSQMLRTGNNFQFTYTFEDVPFHSSYAHSQSLDRLMNPLIDQYLYYLSRTQTTGGTANTQTLGFSQGGPNTMANQAKNWLPGPCYRQQRVSTTTGQNNNSNFAWTAGTKYHLNGRNSLANPGIAMATHKDDKERFFPSNGILIFGKQNAARDNADYSDVMLTSEEEIKATNPVATEEYGIVADNLQQQNTAPQIGTVNSQGALPGMVWQNRDVYLQGPIWAKIPHTDGNFHPSPLMGGFGLKHPPPQILIKNTPVPADPPTTFNQSKLNSFITQYSTGQVSVEIEWELQKENSKRWNPEIQYTSNYYKSTSVDFAVNTEGVYSEPHPIGTRYLTRPL

SEQ ID NO: 1042 - protein, 737 aa, Artificial Sequence
  source: /note="Description of Artificial Sequence: Synthetic polypeptide"
MAADGYLPDWLEDNLSEGIREWWDLKPGAPKPKANQQKQDDGRGLVLPGYKYLGPFNGLDKGEPVNAADAAALEHDKAYDQQLKAGDNPYLRYNHADAEFQERLQEDTSFGGNLGRAVFQAKKRVLEPLGLVEEGANTAPGKKRPVEQSPQEPDSSAGIGKSGAQPAKKRLNFGQTGDTESVPDPQPIGEPPAAPSGVGSLTMASGGGAPVADNNEGADGVGSSSGNWHCDSQWLGDRVITTSTRTWALPTYNNHLYKQISNSTSGGSSNDNAYFGYSTPWGYFDFNRFHCHFSPRDWQRLINNNWGFRPKRLNFKLFNIQVKEVTDNNGVKTIANNLTSTIQVFTDSEYQLPYVLGSAHQGCLPPFPADVFMIPQYGYLTLNNGSQAVGRSSFYCLEYFPSQMLRTGNNFQFTYTFEDVPFHSSYAHSQSLDRLMNPLIDQYLYYLSRTQTTGGTANTQTLGFSQGGPNTMANQAKNWLPGPCYRQQRVSTTTGQNNNSNFAWTAGTKYHLNGRNSLANPGIAMASHKDDKERFFPSNGILIFGKQNAARDNADYSDVMLTSEEEIKTTNPVATEEYGIVADNLQQQNTAPQIGTVNSQGALPGMVWQNRDVYLQGPIWAKIPHTDGNFHPSPLMGGFGLKHPPPQILIKNTPVPADPPTTFNQSKLNSFITQYSTGQVSVEIEWELQKENSKRWNPEIQYTTNYYKSTSVDFAVNTEGVYSEPHPIGTRYLTRPL

SEQ ID NO: 1043 - protein, 736 aa, Artificial Sequence
  source: /note="Description of Artificial Sequence: Synthetic polypeptide"
MAADGYLPDWLEDNLSEGIREWWALKPGAPKPKANQQKQDDGRGLVLPGYKYLGPFNGLDKGEPVNEADAAALEHDKAYDQQLKAGDNPYLRYNHADAEFQERLQEDTSFGGNLGRAVFQAKKRVLEPLGLVEEGAKTAPGKKRPVEQSPQEPDSSSGIGKTGQQPAKKRLNFGQTGDSESVPDPQPLGEPPATPAAVGPTTMASGGGAPMADNNEGADGVGNASGNWHCDSTWLGDRVITTSTRTWALPTYNNHLYKQISSASTGASNDNHYFGYSTPWGYFDFNRFHCHFSPRDWQRLINNNWGFRPKRLNFKLFNIQVKEVTQNEGTKTIANNLTSTIQVFTDSEYQLPYVLGSAHQGCLPPFPADVFMIPQYGYLTLNNGSQAVGRSSFYCLEYFPSQMLRTGNNFQFTYTFEDVPFHSSYAHSQSLDRLMNPLIDQYLYYLSRTQTTGGTANTQTLGFSQGGPNTMANQAKNWLPGPCYRQQRVSTTTGQNNNSNFAWTAGTKYHLNGRNSLANPGIAMATHKDDKERFFPSNGILIFGKQNAARDNADYSDVMLTSEEEIKTTNPVATEEYGIVADNLQQQNTAPQIGTVNSQGALPGMVWQNRDVYLQGPIWAKIPHTDGNFHPSPLMGGFGLKHPPPQILIKNTPVPADPPTTFNQSKLNSFITQYSTGQVSVEIEWELQKENSKRWNPEIQYTSNYYKSTSVDFAVNTEGVYSEPHPIGTRYLTRPL

SEQ ID NO: 1044 - protein, 736 aa, Artificial Sequence
  source: /note="Description of Artificial Sequence: Synthetic polypeptide"
MAADGYLPDWLEDNLSEGIREWWALKPGAPKPKANQQKQDDGRGLVLPGYKYLGPFNGLDKGEPVNEADAAALEHDKAYDQQLKAGDNPYLRYNHADAEFQERLQEDTSFGGNLGRAVFQAKKRVLEPFGLVEEGAKTAPGKKRPVEQSPQEPDSSSGIGKTGQQPAKKRLNFGQTGDSESVPDPQPLGEPPATPAAVGPTTMASGGGAPMADNNEGADGVGNASGNWHCDSQWLGDRVITTSTRTWALPTYNNHLYKQISSASTGASNDNHYFGYSTPWGYFDFNRFHCHFSPRDWQRLINNNWGFRPKRLNFKLFNIQVKEVTDNNGVKTIANNLTSTVQVFSDSEYQLPYVLGSAHQGCLPPFPADVFMIPQYGYLTLNNGSQAVGRSSFYCLEYFPSQMLRTGNNFQFTYTFEDVPFHSSYAHSQSLDRLMNPLIDQYLYYLSRTQTTGGTANTQTLGFSQGGPNTMANQAKNWLPGPCYRQQRVSTTTGQNNNSNFAWTAGTKYHLNGRNSLANPGIAMATHKDDKERFFPSNGILIFGKQNAARDNADYSDVMLTSEEEIKTTNPVATEEYGIVADNLQQQNTAPQIGTVNSQGALPGMVWQNRDVYLQGPIWAKIPHTDGNFHPSPLMGGFGLKHPPPQILIKNTPVPADPPTTFNQSKLNSFITQYSTGQVSVEIEWELQKENSKRWNPEIQYTSNYYKSTSVDFAVNTEGVYSEPHPIGTRYLTRPL

SEQ ID NO: 1045 - protein, 736 aa, Artificial Sequence
  source: /note="Description of Artificial Sequence: Synthetic polypeptide"
MAADGYLPDWLEDTLSEGIRQWWKLKPGPPPPKPAERHKDDSRGLVLPGYKYLGPFNGLDKGEPVNEADAAALEHDKAYDRQLDSGDNPYLKYNHADAEFQERLKEDTSFGGNLGRAVFQAKKRVLEPFGLVEEGAKTAPGKKRPVEQSPQEPDSSSGIGKTGQQPAKKRLNFGQTGDSESVPDPQPLGEPPATPAAVGPTTMASGGGAPMADNNEGADGVGNASGNWHCDSTWLGDRVITTSTRTWALPTYNNHLYKQISSASTGASNDNHYFGYSTPWGYFDFNRFHCHFSPRDWQRLINNNWGFRPKRLNFKLFNIQVKEVTDNNGVKTIANNLTSTVQVFTDSDYQLPYVLGSAHEGCLPPFPADVFMIPQYGYLTLNNGSQAVGRSSFYCLEYFPSQMLRTGNNFQFTYTFEDVPFHSSYAHSQSLDRLMNPLIDQYLYYLSRTQTTGGTANTQTLGFSQGGPNTMANQAKNWLPGPCYRQQRVSTTTGQNNNSNFAWTAGTKYHLNGRNSLANPGIAMATHKDDKERFFPSNGILIFGKQNAARDNADYSDVMLTSEEEIKTTNPVATEEYGIVADNLQQQNTAPQIGTVNSQGALPGMVWQNRDVYLQGPIWAKIPHTDGNFHPSPLMGGFGLKHPPPQILIKNTPVPADPPTTFNQSKLNSFITQYSTGQVSVEIEWELQKENSKRWNPEIQYTSNYYKSTSVDFAVNTEGVYSEPHPIGTRYLTRNL

SEQ ID NO: 1046 - protein, 738 aa, Artificial Sequence
  source: /note="Description of Artificial Sequence: Synthetic polypeptide"
MAADGYLPDWLEDNLSEGIREWWDLKPGAPKPKANQQKQDDGRGLVLPGYKYLGPFNGLDKGEPVNAADAAALEHDKAYDQQLQAGDNPYLRYNHADAEFQERLQEDTSFGGNLGRAVFQAKKRVLEPLGLVEEGAKTAPGKKRPVEPSPQRSPDSSTGIGKKGQQPARKRLNFGQTGDSESVPDPQPLGEPPAAPSGVGPNTMAAGGGAPMADNNEGADGVGSSSGNWHCDSQWLGDRVITTSTRTWALPTYNNHLYKQISNSTSGGSSNDNAYFGYSTPWGYFDFNRFHCHFSPRDWQRLINNNWGFRPKRLSFKLFNIQVKEVTQNEGTKTIANNLTSTIQVFTDSEYQLPYVLGSAHQGCLPPFPADVFMIPQYGYLTLNNGSQAVGRSSFYCLEYFPSQMLRTGNNFTFSYTFEDVPFHSSYAHSQSLDRLMNPLIDQYLYYLSRTQTTGGTANTQTLGFSQGGPNTMANQAKNWLPGPCYRQQRVSTTTGQNNNSNFAWTAGTKYHLNGRNSLANPGIAMATHKDDKERFFPSNGILIFGKQNAARDNADYSDVMLTSEEEIKTTNPVATEEYGIVADNLQQQNTAPQIGTVNSQGALPGMVWQNRDVYLQGPIWAKIPHTDGNFHPSPLMGGFGLKHPPPQILIKNTPVPADPPTTFNQSKLNSFITQYSTGQVSVEIEWELQKENSKRWNPEIQYTSNYYKSTSVDFAVNTEGVYSEPHPIGTRYLTRPL

SEQ ID NO: 1047 - protein, 737 aa, Artificial Sequence
  source: /note="Description of Artificial Sequence: Synthetic polypeptide"
MAADGYLPDWLEDNLSEGIREWWDLKPGAPKPKANQQKQDDGRGLVLPGYKYLGPFNGLDKGEPVNAADAAALEHDKAYDQQLKAGDNPYLRYNHADAEFQERLQEDTSFGGNLGRAVFQAKKRVLEPFGLVEEGAKTAPGKKRPVEQSPQEPDSSSGIGKTGQQPAKKRLNFGQTGDSESVPDPQPLGEPPATPAAVGPTTMASGGGAPMQDNNEGADGVGSSSGNWHCDSTWLGDRVITTSTRTWALPTYNNHLYKQISNGTSGGATNDNTYFGYSTPWGYFDFNRFHCHFSPRDWQRLINNNWGFRPKRLNFKLFNIQVKEVTQNEGTKTIANNLTSTIQVFTDSEYQLPYVLGSAHQGCLPPFPADVFMIPQYGYLTLNNGSQAVGRSSFYCLEYFPSQMLRTGNNFTFSYTFEDVPFHSSYAHSQSLDRLMNPLIDQYLYYLSRTQTTGGTANTQTLGFSQGGPNTMANQAKNWLPGPCYRQQRVSTTTGQNNNSNFAWTAGTKYHLNGRNSLANPGIAMATHKDDKERFFPSNGILIFGKQNAARDNADYSDVMLTSEEEIKTTNPVATEEYGIVADNLQQQNTAPQIGTVNSQGALPGMVWQNRDVYLQGPIWAKIPHTDGNFHPSPLMGGFGLKHPPPQILIKNTPVPADPPTTFNQSKLNSFITQYSTGQVSVEIEWELQKENSKRWNPEIQYTSNYYKSTSVDFAVNTEGVYSEPHPIGTRYLTRPL

SEQ ID NO: 1048 - protein, 736 aa, Artificial Sequence
  source: /note="Description of Artificial Sequence: Synthetic polypeptide"
MAADGYLPDWLEDNLSEGIREWWALKPGAPKPKANQQKQDDGRGLVLPGYKYLGPFNGLDKGEPVNAADAAALEHDKAYDQQLKAGDNPYLRYNHADAEFQERLQEDTSFGGNLGRAVFQAKKRVLEPLGLVEEGAKTAPGKKRPVEQSPQEPDSSSGIGKTGQQPAKKRLNFGQTGDSESVPDPQPLGEPPATPAAVGPTTMASGGGAPMADNNEGADGVGSSSGNWHCDSTWLGDRVITTSTRTWALPTYNNHLYKQISSASTGASNDNHYFGYSTPWGYFDFNRFHCHFSPRDWQRLINNNWGFRPKRLNFKLFNIQVKEVTDNNGVKTIANNLTSTVQVFTDSDYQLPYVLGSAHEGCLPPFPADVFMIPQYGYLTLNNGSQAVGRSSFYCLEYFPSQMLRTGNNFTFSYTFEDVPFHSSYAHSQSLDRLMNPLIDQYLYYLSRTQTTGGTANTQTLGFSQGGPNTMANQAKNWLPGPCYRQQRVSTTTGQNNNSNFAWTAGTKYHLNGRNSLANPGIAMATHKDDKERFFPSNGILIFGKQNAARDNADYSDVMLTSEEEIKTTNPVATEEYGIVADNLQQQNTAPQIGTVNSQGALPGMVWQNRDVYLQGPIWAKIPHTDGNFHPSPLMGGFGLKHPPPQILIKNTPVPADPPTTFNQSKLNSFITQYSTGQVSVEIEWELQKENSKRWNPEIQYTSNYYKSTSVDFAVNTEGVYSEPHPIGTRYLTRPL

SEQ ID NO: 1049 - protein, 737 aa, Artificial Sequence
  source: /note="Description of Artificial Sequence: Synthetic polypeptide"
MAADGYLPDWLEDNLSEGIREWWDLKPGAPKPKANQQKQDDGRGLVLPGYKYLGPFNGLDKGEPVNAADAAALEHDKAYDQQLKAGDNPYLRYNHADAEFQERLQEDTSFGGNLGRAVFQAKKRVLEPLGLVEEGAKTAPGKKRPVEPSPQRSPDSSTGIGKKGQQPARKRLNFGQTGDSESVPDPQPLGEPPATPAAVGPTTMASGGGAPMADNNEGADGVGNASGNWHCDSTWLGDRVITTSTRTWALPTYNNHLYKQISSASTGASNDNHYFGYSTPWGYFDFNRFHCHFSPRDWQRLINNNLGSRPKRLNFKLFIIQVKEVTTNDGVTTIANNLTSTVQVFSDSEYQLPYVLGSAHQGCLPPFPADVFMIPQYGYLTLNNGSQAVGRSSFYCLEYFPSQMLRTGNNFTFSYTFEDVPFHSSYAHSQSLDRLMNPLIDQYLYYLNRTQNQSGSAQNKDLLFSRGSPAGMSVQPKNWLPGPCYRQQRVSKTKTDNNNSNFTWTGASKYNLNGRESIINPGTAMASHKDDKDKFFPMSGVMIFGKESAGASNTALDNVMITDEEEIKATNPVATERFGTVAVNLQSSSTDPATGDVHVMGALPGMVWQDRDVYLQGPIWAKIPHTDGHFHPSPLMGGFGLKHPPPQILIKNTPVPANPPAEFSATKFASFITQYSTGQVSVEIEWELQKENSKRWNPEVQYTSNYAKSANVDFTVDNNGLYTEPRPIGTRYLTRPL

SEQ ID NO: 1050 - protein, 736 aa, Artificial Sequence
  source: /note="Description of Artificial Sequence: Synthetic polypeptide"
MAADGYLPDWLEDNLSEGIREWWALKPGAPKPKANQQKQDDGRGLVLPGYKYLGPFNGLDKGEPVNAADAAALEHDKAYDQQLKAGDNPYLRYNHADAEFQERLQEDTSFGGNLGRAVFQAKKRLLEPLGLVEEAAKTAPGKKRPVEQSPQEPDSSSGIGKTGQQPAKKRLNFGQTGDSESVPDPQPIGEPPATPAAVGPTTMASGGGAPMADNNEGADGVGNSSGNWHCDSTWLGDRVITTSTRTWALPTYNNHLYKQISSASTGASNDNHYFGYSTPWGYFDFNRFHCHFSPRDWQRLINNNWGFRPKRLNFKLFNIQVKEVTQNEGTKTIANNLTSTIQVFTDSEYQLPYVLGSAHQGCLPPFPADVFMIPQYGYLTLNNGSQAVGRSSFYCLEYFPSQMLRTGNNFTFSYTFEDVPFHSSYAHSQSLDRLMNPLIDQYLYYLSRTQTTGGTANTQTLGFSQGGPNTMANQAKNWLPGPCYRQQRVSTTTGQNNNSNFAWTAGTKYHLNGRNSLANPGIAMATHKDDKERFFPSNGILIFGKQNAARDNADYSDVMLTSEEEIKTTNPVATEEYGIVADNLQQQNTAPQIGTVNSQGALPGMVWQNRDVYLQGPIWAKIPHTDGNFHPSPLMGGFGLKHPPPQILIKNTPVPADPPTTFNQSKLNSFITQYSTGQVSVEIEWELQKENSKRWNPEIQYTSNYYKSTSVDFAVNTEGVYSDPHPIGTRYLTRPL

SEQ ID NO: 1051 - protein, 736 aa, Artificial Sequence
  source: /note="Description of Artificial Sequence: Synthetic polypeptide"
MAADGYLPDWLEDNLSEGIREWWALKPGAPKPKANQQEQDDGRGLVLPGYKYLGPFNGLDKGEPVNAADAAALEHDKAYDQQLKAGDNPYLRYNHADAEFQERLQEDTSFGGNLGRAVFQAKKRVLEPFGLVEEGAKTAPGKKRPVEQSPQEPDSSSGIGKTGQQPAKKRLNFGQTGDSESVPDPQPLGEPPAAPSGVGPNTMAAGGGAPMADNNEGADGVGSSSGNWHCDSTWLGDRVITTSTRTWALPTYNNHLYKQISSASTGASNDNHYFGYSTPWGYFDFNRFHCHFSPRDWQRLINNNWGFRPKRLNFKLFNIQVKEVTQNEGTKTIANNLTSTIQVFTDSEYQLPYVLGSAHQGCLPPFPADVFMIPQYGYLTLNNGSQAVGRSSFFCLEYFPSQMLRTGNNFTFSYTFEDVPFHSSYAHSQSLDRLMNPLIDQYLYYLSRTQTTGGTANTQTLGFSQGGPNTMANQAKNWLPGPCYRQQRVSTTTGQNNNSNFAWTAGTKYHLNGRNSLANPGIAMATHKDDKERFFPSNGILIFGKQNAARDNADYSDVMLTSEEEIKTTNPVATEEYGIVADNLQQQNTAPQIGTVNSQGALPGMVWQNRDVYLQGPIWAKIPHTDGNFHPSPLMGGFGLKHPPPQILIKNTPVPADPPTTFNQSKLNSFITQYSTGQVSVEIEWELQKENSKRWNPEIQYTSNYYKSTSVDFAVNTEGVYSEPHPIGTRYLTRPL

SEQ ID NO: 1052 - protein, 736 aa, Artificial Sequence
  source: /note="Description of Artificial Sequence: Synthetic polypeptide"
MAADGYLPDWLEDNLSEGIREWWDLKPGAPKPKANQQKQDDGRGLVLPGYKYLGPFNGLDKGEPVNAADAAALEHDKAYDQQLKAGDNPYLRYNHADAEFQERLQEDTSFGGNLGRAVFQAKKRVLEPLGLVEEGAKTAPGKKRPVEQSPQEPDSSSGIGKTGQQPAKKRLNFGQTGDSESVPDPQPLGEPPATPAAVGPTTMASGGGAPMADNNEGADGVGNASGNWHCDSTWLGDRVITTSTRTWALPTYNNHLYKQISSASTGASNDNHYFGYSTPWGYFDFNRFHCHFSPRDWQRLINNNWGFRPKRLNFKLFNIQVKEVTTNDGVTTIANNLTSTVQVFSDSEYQLPYVLGSAHQGCLPPFPADVFMIPQYGYLTLNNGSQAVGRSSFYCLEYFPSQMLRTGNNFTFSYTFEDVPFHSSYAHSQSLDRLMNPLIDQYLYYLNRTQNQSGSAQNKDLLFSRGSPAGMSVQPKNWLPGPCYRQQRVSKTKTDNNNSNFTWTGASKYNLNGRESIINPGTAMASHKDDKDKFFPMSGVMIFGKESAGASNTALDNVMITDEEEIKATNPVATERFGTVAVNLQNSSTDPATGDVHVMGALPGMVWQDRDVYLQGPIWAKIPHTDGHFHPSPLMGGFGLKHPPPQILIKNTPVPANPPAEFSATKFASFITQYSTGQVSVEIEWELQKENSKRWNPEVQYTSNYAKSANVDFTVDNNGLYTVPRPIGTRYLTRPL

SEQ ID NO: 1053 - protein, 736 aa, Artificial Sequence
  source: /note="Description of Artificial Sequence: Synthetic polypeptide"
MAADGYLPDWLEDNLSEGIREWWALKPGAPKPKANQQKQDDGRGLVLPGYKYLGPFNGLDKGEPVNAADAAALEHDKAYDQQLKAGDNPYLRYNHADAEFQERLQEDTSFGGNLGRAVFQAKKRLLEPLGLVEEGAKTAPGKKRPVEQSPQEPDSSSGIGKTGEQPAKKRLNFGQTGDSESVPDPQPLGEPPATPAAVGPTTMASGGGAPMADNNEGADGVGSASGNWHCDSTWLGDRVITTSTRTWALPTYNNHLYKQISSASTGASNDNHYFGYSTPWGYFDFNRFHCHFSPRDWQRLINNNWGFRPKRLNFKLFNIQVKEVTDNNGVKTIANNLTSTIQVFTDSEYQLPYVLGSAHQGCLPPFPADVFMIPQYGYLTLNNGSQAVGRSSFYCLEYFPSQMLRTGNNFPFSYTFEDVPFHSSYAHSQSLDRLMNPLIDQYLYYLSRTQTTGGTANTQTLGFSQGGPNTMANQAKNWLPGPCYRQQRVSTTTGQNNNSNFAWTAGTKYHLNGRNSLANPGIAMATHKDDKERFFPSNGILIFGKQNAARDNADYSDVMLTSEEEIKTTNPVATEEYGIVADNLQQQNTAPQIGTVNSQGALPGMVWQNRDVYLQGPIWAKIPHTDGNFHPSPLMGGFGLKHPPPQILIKNTPVPADPPTTFNQSKLNSFITQYSTGQVSVEIEWELQKENSKRWNPEIQYTSNYYKSTSVDFAVNTEGVYSEPHPIGTRYLTRPL

SEQ ID NO: 1054 - protein, 736 aa, Artificial Sequence
  source: /note="Description of Artificial Sequence: Synthetic polypeptide"
MAADGYLPDWLEDNLSEGIREWWALKPGAPKPKANQQKQDDGRGLVLPGYKYLGPFNGLDKGEPVNAADAAALEHDKAYDQQLKAGDNPYLRYNHADAEFQERLQEDTSFGGNLGRAVFQAKKRVLEPLGLVEEGAKTAPGKKRPVEQSPQEPDSSSGIGKTGQQPAKKRLNFGQTGDSESVPDPQPLGEPPATPAAVGPTTMASGGGAPMADNNEGADGVGSSSGNWHCDSQWLGDRVITTSTRTWALPTYNNHLYKQISSASTGASNDNHYFGYSTPWGYFDFNRFHCHFSPRDWQRLINNNWGFRPKRLNFKLFNIQVKEVTDNNGVKTIANNLTSTVQVFTDSEYQLPYVLGSAHQDCLPPFPADVFMIPQYGYLTLNNGSQAVGRSSFYCLEYFPSQMLRTGNNFTFSYTFEDVPFHSSYAHSQSLDRLMNPLIDQYLYYLSRTQTTGGTANTQTLGFSQGGPNTMANQAKNWLPGPCYRQQRVSTTTGQNNNSNFAWTAGTKYHLNGRNSLANPGIAMATHKDDKERFFPSNGILIFGKQNAARDNADYSDVMLTSEEEIKTTNPVATEEYGIVADNLQQQNTAPQIGTVNSQGALPGMVWQNRDVYLQGPIWAKIPHTDGNFHPSPLMGGFGLKHPPPQILIKNTPVPADPPTTFNQSKLNSFITQYSTGQVSVEIEWELQKENSKRWNPEIQYTSNYYKSTSVDFAVNTEGVYSEPHPIGTRYLTRPL

SEQ ID NO: 1055 - protein, 735 aa, Artificial Sequence
  source: /note="Description of Artificial Sequence: Synthetic polypeptide"
MAADGYLPDWLEDNLSEGIREWWDLKPGAPKPKANQQKQDDGRGLVLPGYKYLGPFNGLDKGEPVNAADAAALEHDKAYDQQLKAGDNPYLRYNHADAEFQERLQEDTSFGGNLGRAVFQAKKRVLEPLGLVEEGAKTAPGKKRPVEQSPQEPDSSSGIGKTGQQPAKKRLNFGQTGDSESVPDPQPLGEPPATPAAVGPTTMASGGGAPMADNNEGADGVGNASGNWHCDSTWLGDVITTSTRTWALPTYNNHLYKQISSASTGASNDNHYFGYSTPWGYFDFNRFHCHFSPRDWQRLINNNWGFRPKRLNFKLFNIQVKEVTQNEGTKTIANNLTSTIQVFTDSEYQLPYVLGSAHQGCLPPFPADVFMIPQYGYLTLNNGSQAVGRSSFYCLEYFPSQMLRTGNNFQFTYTFEDVPFHSSYAHSQSLDRLMNPLIDQYLYYLSRTQTTGGTANTQTLGFSQGGPNTMANQAKNWLPGPCYRQQRVSTTTGQNNNSNFAWTAGTKYHLNGRNSLANPGIAMATHKDDKERFFPSNGILIFGKQNAARDNADYSDVILTSEEEIKTTNPVATEEYGIVADNLQQQNTAPQIGTVNSQGALPGMVWQNRDVYLQGPIWAKIPHTDGNFHPSPLMGGFGLKHPPPQILIKNTPVPADPPTTFNQSKLNSFITQYSTGQVSVEIEWELQKENSKRWNPEIQYTSNYYKSTSVDFAVNTEGVYSEPHPIGTRYLTRPL

SEQ ID NO: 1056 - protein, 736 aa, Artificial Sequence
  source: /note="Description of Artificial Sequence: Synthetic polypeptide"
MAADGYLPDWLEDTLSEGIRQWWKLKPGPPPPKPAERHKDDSRGLVLPGYKYLGPFNGLDKGEPVNEADAAALEHDKAYDRQLDSGDNPYLKYNHADAEFQERLKEDTSFGGNLGRAVFQAKKRVLEPFGLVEEGAKTAPGKKRPVEQSPQEPDSSSGIGKTGQQPAKKRLNFGQTGDSESVPDPQPLGEPPATPAAVGPTTMASGGGAPMADNNEGADGVGNASGNWHCDSTWLGDRVITTSTRTWALPTYNNHLYKQISSTSTGASNDNHYFGYSTPWGYFDFNRFHCHFSPRDWQRLINNNWGFRPKRLNFKLFNIQVKEVTDNNGVKTIANNLTSTVQVFTDSEYQLPYVLGSAHQGCLPPFPADVFMIPQYGYLTLNNGSQAVGRSSFYCLEYFPSQMLRTGNNFTFSYTFEDVPFHSSYAHSQSLDRLMNPLIDQYLYYLSRTQTTGGTANTQTLGFSQGGPNTMANQAKNWLPGPCYRQQRVSTTTGQNNNSNFAWTAGTKYHLNGRNSLANPGIAMATHKDDKERFFPSNGILIFGKQNAARDNADYSDVMLTSEEEIKTTNPVATEEYGIVADNLQQQNTAPQIGTVNSQGALPGMVWQNRDVYLQGPIWAKIPHTDGNFHPSPLMGGFGLKHPPPQILIKNTPVPADPPTTFNQSKLNSFITQYSTGQVSVEIEWELQKENSKRWNPEIQYTSNYYKSTSVDFAVNTEGVYSEPHPIGTRYLTRPL

SEQ ID NO: 1057 - protein, 735 aa, Artificial Sequence
  source: /note="Description of Artificial Sequence: Synthetic polypeptide"
MAADGYLPDWLEDNLSEGIREWWDLKPGAPKPKANQQKQDDGRGLVLPGYKYLGPFNGLDKGEPVNAADAAALEHDKAYDRQLDSGDNPYLRYNHADAEFQERLKEDTSFGGNLGRAVFQAKKRVLEPFGLVEEGAKTAPGKKRPVEQSPQEPDSSSGIGKTGQQPAKKRLNFGQTGDSESVPDPQPLGEPPATPAAVGPTTMASGGGAPMADNNEGADGVGNASGNWHCDSTWLGDRVITTSTRTWALPTYNNHLYKQISSASTGASNDNHYFGYSTPWGYFDFNRFHCHFSPRDWQRLINNNWGFRPKRLNFKLFNIQVKEVTQNEGTKTIANNLTSTIQVFTDSEYQLPYVLGSAHQGCLPPFPADVFMIPQYGYLTLNNGSQAVGRSSFYCLEYFPSQMLRTGNNFQFTYTFEDVPFHSSYAHSQSLDRLMNPLIDQYLYYLSRTQTTGGTANTQTLGFSQGGPNTMANQAKNWLPGPCYRQQRVSTTTGQNNNSNFAWTAGTKYHLNGRNSLANPGIAMATHKDDRSVFFQYRDPDFGKQNAARDNADYSDVMLTSEEEIKTTNPVATEEYGIVADNLQQQNTAPQIGTVNSQGALPGMVWQNRDVYLQGPIWAKIPHTDGNFHPSPLMGGFGLKHPPPQILIKNTPVPADPPTTFNQSKLNSFITQYSTGQVSVEIEWELQKENSKRWNPEIQYTSNYYKSTSVDFAVNTEGVYSEPHPIGTRYLTRPL

SEQ ID NO: 1058 - protein, 736 aa, Artificial Sequence
  source: /note="Description of Artificial Sequence: Synthetic polypeptide"
MAADGYLPDWLEDNLSEGIREWWALKPGAPKPKANQQKQDDGRGLVLPGYKYLGPFNGLDKGEPVNAADAAALEHDKAYDQQLKAGDNPYLKYNHADAEFQERLQGDTSFGGNLGRAVFQAKKRVLEPLGLVEEAAKTAPGKKRPVEQSPQEPDSSAGIGKSGAQPAKKRLNFGQTGDTESVPDPQPLGEPPAAPSGVGPNTMAAGGGAPMADNNEGADGVGSSSGNWHCDSQWLGDRVITTSTRTWALPTYNNHLYKQISSASTGASNDNHYFGYSTPWGYFDFNRFHCHFSPRDWQRLINNNWGFRPKRLNFKLFNIQVKEVTDNNGVKTIANNLTSTVQVFTDSDYQLPYVLGSAHEGCLPPFPADVFMIPQYGYLTLNNGSQAVGRSSFYCLEYFPSQMLRTGNNFQFTYTFEDVPFHSSYAHSQSLDRLMNPLIDQYLYYLSRTQTTGGTANTQTLGFSQGGPNTMANQAKNWLPGPCYRQQRVSTTTGQNNNSNFAWTAGTKYHLNGRNSLANPGIAMATHKDDKERFFPSNGILIFGKQNAARDNADYSDVMLTSEEEIKTTNPVATEEYGIVADNLQQQNTAPQIGTVNSQGALPGMVWQNRDVYLQGPIWAKIPHTDGNFHPSPLMGGFGLKHPPPQILIKNTPVPADPPTTFNQSKLNSFITQYSTGQVSVEIEWELQKENSKRWNPEIQYTSNYYKSTSVDFAVNTEGVYSEPHPIGTRYLTRPL

SEQ ID NO: 1059 - protein, 736 aa, Artificial Sequence
  source: /note="Description of Artificial Sequence: Synthetic polypeptide"
MAADGYLPDWLEDTLSEGIRQWWKLKPGPPPPKPAERHKDDSRGLVLPGYKYLGPFNGLDKGEPVNEADAAALEHDKAYDRQLDSGDNPYLKYNHADAEFQERLKEDTSFGGNLGRAVFQAKKRVLEPFGLVEEAAKTAPGKKRPVEQSPQEPDSSSGIGKTGQQPAKKRLNFGQTGDSESVPDPQPLGEPPATPAAVGPTTMASGGGAPMADNNEGADGVGNASGNWHCDSTWLGDRVITTSTRTWALPTYNNHLYKQISSASTGASNDNHYFGYSTPWGYFDFNRFHCHFSPRDWQRLINNNWGFRPKRLNFKLFNIQVKEVTDNNGVKTIANNLTSTVQVFTDSDYQLPYVLGSAHEGCLPPFPADVFMIPQYGYLTLNNGSQAVGRSSFYCLEYFPSQMLRTGNNFTFSYTFEDVPFHSSYAHSQSLDRLMNPLIDQYLYYLSRTQTTGGTANTQTLGFSQGGPNTMANQAKNWLPGPCYRQQRVSTTTGQNNNSNFAWTAGTKYHLNGRNSLANPGIAMATHKDDKERFFPSNGILIFGKQNAARDNADYSDVMLTSEEEIKTTNPVATEEYGIVADNLQQQNTAPQIGTVNSQGALPGMVWQNRDVYLQGPIWAKIPHTDGNFHPSPLMGGFGLKHPPPQILIKNTPVPADPPTTFNQSKLNSFITQYSTGQVSVEIEWELQKENSKRWNPEIQYTSNYYKSTSVDFAVNTEGVYSEPHPIGTRYLTRPL

SEQ ID NO: 1060 - protein, 736 aa, Artificial Sequence
  source: /note="Description of Artificial Sequence: Synthetic polypeptide"
MAADGYLPDWLEDNLSEGIREWWALKPGAPKPKANQQKQDDGRGLVLPGYKYLGPFNGLDKGEPVNAADAAALEHDKAYDQQLKAGDNPYLRYNHADAEFQERLQEDTSFGGNLGRAVFQAKKRVLEPLGLVEEGAKTAPGKKRPVEQSPQEPDSSSGIGKTGQQPAKKRLNFGQTGDSESVPDPQPLGEPPATPAAVGPTTMASGGGAPMADNNEGADGVGSSSGNWHCDSTWLGDRVITTSTRTWALPTYNNHLYKQISSASTGASNDNHYFGYSTPWGYFDFNRFHCHFSPRDWQRLINNNWGFRPKRLNFKLFNIQVKEVTDNNGVKTIANNLTSTVQVFTDSEYQLPYVLGSAHQGCLPPFPADVFMIPQYGYLTLNNGSQAVGRSSFYCLEYFPSQMLRTGNNFTFSYTFEDVPFHSSYAHSQSLDRLMNPLIDQYLYYLSRTQTTGGTANTQTLGFSQGGPNTMANQAKNWLPGPCYRQQRVSTTTGQNNNSNFAWTAGTKYHLNGRNSLANPGIAMATHKDDKERFFPSNGILIFGKQNAARDNADYSDVMLTSEEEIKTTNPVATEEYGIVADNLQQQNTAPQIGTVNSQGALPGMVWQNRDVYLQGPIWAKIPHTDGNFHPSPLMGGFGLKHPPPQILIKNTPVPADPPTTFNQSKLNSFITQYSTGQVSVEIEWELQKENSKRWNPEIQYTSNYYKSTSVDFAVNTEGVYSEPHPIGTRYLTRPL

SEQ ID NO: 1061 - protein, 737 aa, Artificial Sequence
  source: /note="Description of Artificial Sequence: Synthetic polypeptide"
MAADGYLPDWLEDNLSEGIREWWALKPGAPKPKANQQKQDDGRGLVLPGYKYLGPFNGLDKGEPVNAADAAALEHDKAYDQQLKAGDNPYLRYNHADAEFQERLQEDTSFGGNLGRAVFQAKKRVLEPLGLVEEGAKTAPGKKRPVEQSPQEPDSSSGIGKTGQQPAKKRLNFGQTGDTESVPDPQPIGEPPAAPSGVGSLTMASGGGAPVADNNEGADGVGSSSGNWHCDSQWLGDRVITTSTRTWALPTYNNHLYKQISNSTSGGSSNDNAYFGYSTPWGYFDFNRFHCHFSPRDWQRLINNNWGFRPKRLNFKLFNIQVKEVTQNEGTKTIANNLTSTIQVFTDSEYQLPYVLGSAHQGCLPPFPADVFMIPQYGYLTLNNGSQAVGRSSFYCLEYFPSQMLRTGNNFQFTYTFEDVPFHSSYAHSQSLDRLMNPLIDQYLYYLSRTQTTGGTANTQTLGFSQGGPNTMANQAKNWLPGPCYRQQRVSTTTGQNNNSNFAWTAGTKYHLNGRNSLANPGIAMATHKDDKERFFPSNGILIFGKQNAARDNADYSDVMLTSEEEIKTTNPVATEEYGIVADNLQQQNTAPQIGTVNSQGALPGMVWQNRDVYLQGPIWAKIPHTDGNFHPSPLMGGFGLKHPPPQILIKNTPVPADPPTTFNQSKLNSFITQYSTGQVSVEIEWELQKENSKRWNPEIQYTSNYYKSTSVDFAVNTEGVYSEPHPIGTRYLTRPL

SEQ ID NO: 1062 - protein, 736 aa, Artificial Sequence
  source: /note="Description of Artificial Sequence: Synthetic polypeptide"
MAADGYLPDWLEDNLSEGIREWWALKPGAPKPKANQQKQDDGRGLVLPGYKYLGPFNGLDKGEPVNAADAAALEHDKAYDQQLKAGDNPYLKYNHADAEFQERLQGDTSFGGNLGRAVFQAKKRVLEPLGLVEEAAKTAPGKKRPVEQSPQEPDSSAGIGKSGAQPAKKRLNFGQTGDTESVPDPQPLGEPPAAPSGVGPNTMAAGGGAPMADNNEGADGVGSSSGNWHCDSQWLGDRVITTSTRTWALPTYNNHLYKQISSASTGASNDNHYFGYSTPWGYFDFNRFHCHFSPRDWQRLINNNWGFRPKRLNFKLFNIQVKEVTDNNGVKTIANNLTSTVQVFTDSEYQLPYVLGSAHQGCLPPFPADVFMIPQYGYLTLNNGSQAVGRSSFYCLEYFPSQMLRTGNNFTFSYTFEDVPFHSSYAHSQSLDRLMNPLIDQYLYYLSRTQTTGGTANTQTLGFSQGGPNTMANQAKNWLPGPCYRQQRVSTTTGQNNNSNFAWTAGTKYHLNGRNSLANPGIAMATHKDDKERFFPSNGILIFDKQNAARDNADYSDVMLTSEEEIKTTNPVATEEYGIVADNLQQQNTAPQIGTVNSQGALPGMVWQNRDVYLQGPIWAKIPHTDGNFHPSPLMGGFGLKHPPPQILIKNTPVPADPPTTFNQSKLNSFITQYSTGQVSVEIEWELQKENSKRWNPEIQYTSNYYKSTSVDFAVNTEGVYSEPHPIGTRYLTRPL

SEQ ID NO: 1063 - protein, 736 aa, Artificial Sequence
  source: /note="Description of Artificial Sequence: Synthetic polypeptide"
MAADGYLPDWLEDTLSEGIRQWWKLKPGPPPPKPAERHKDDSRGLVLPGYKYLGPFNGLDKGEPVNEADAAALEHDKAYDRQLDSGDNPYLKYNHADAEFQERLKEDTSFGGNLGRAVFQAKKRVLEPLGLVEEPVKTAPGKKRPVEHSPVEPDSSSGTGKAGQQPARKRLNFGQTGDSESVPDPQPLGEPPATPAAVGPNTMATGSGAPMADNNEGADGVGNSSGNWHCDSTWMGDRVITTSTRTWALPTYNNHLYKQISSASTGASNDNHYFGYSTPWGYFDFNRFHCHFSPRDWQRLINNNWGFRPKRLNFKLFNIQVKEVTDNNGVKTIANNLTSTIQVFTDSEYQLPYVLGSAHQGCLPPFPADVFMIPQYGYLTLNNGSQAVGRSSFYCLEYFPSQMLRTGNNFTFSYTFEDVPFHSSYAHSQSLDRLMNPLIDQYLYYLSRTQTTGGKANTQTLGFSQGGPNTMANQAKNWLPGPCYRQQRVSTTTGQNNNSNFAWTAGTKYHLNGRNSLANPGIAMATHKDDKERFFPSNGILIFGKQNAARDNADYSDVMLTSEEEIKTTNPVATEEYGIVADNLQQQNTAPQIGTVNSQGALPGMVWQNRDVYLQGPIWAKIPHTDGNFHPSPLMGGFGLKHPPPQILIKNTPVPADPPTTFNQSKLNSFITQYSTGQVSVEIEWELQKENSKRWNPEIQYTSNYYKSTSVDFAVNTEGVYSEPHPIGTRYLTRPL

SEQ ID NO: 1064 - protein, 736 aa, Artificial Sequence
  source: /note="Description of Artificial Sequence: Synthetic polypeptide"
MAADGYLPDWLEDNLSEGIREWWALKPGAPKPKANQQKQDDGRGLVLPGYKYLGPFNGLDKGEPVNAADAAALEHDKAYDQQLKAGDNPYLRYNHADAEFQERLQEDTSFGGNLGRAVFQAKKRVLEPFGLVEEGAKTAPGKKRPVEQSPQEPDSSSGIGKTGQQPAKKRLNFGQTGDSESVPDPQPLGEPPATPAAVGPTTMASGGGAPMADNNEGADGVGNASGNWHCDSTWLGDRVITTSTRTWALPTYNNHLYKQISSASTGASNDNHYFGYSTPWGYFDFNRFHCHFSPRDWQRLINNNWGFRPKRLNFKLFNIQVKEVTDNNGVKTIANNLTSTVQVFTDSEYQLPYVLGSAHQGCLPPFPADVFMIPQYGYLTLNNGSQAVGRSSFYCLEYFPSQMLRTGNNFTFSYTFEDVPFHSSYAHSQSLDRLMNPLIDQYLYYLSRTQTTGGTGNTQTLGFSQGGPNTMANQAKNWLPGPCYRQQRVSTTTGQNNNSNFAWTAGTKYHLNGRNSLANPGIAMATHKDDKERFFPSNGILIFGKQNAARDNADYSDVMLTSEEEIKTTNPVATEEYGIVADNLQQQNTAPQIGTVNSQGALPGMVWQNRDVYLQGPIWAKIPHTDGNFHPSPLMGGFGLKHPPPQILIKNTPVPADPPTTFNQSKLNSFITQYSTGQVSVEIEWELQKENSKRWNPEIQYTSNYYKSTSVDFAVNTEGVYSEPHPIGTRYLTRPL

SEQ ID NO: 1065 - protein, 736 aa, Artificial Sequence
  source: /note="Description of Artificial Sequence: Synthetic polypeptide"
MAADGYLPDWLEDNLSEGIREWWDLKPGAPKPKANQQKQDDGRGLVLPGYKYLGPFNGLDKGEPVNAADAAALEHDKAYDQQLKAGDNPYLRYNHADAEFQERLQEDTSFGGNLGRAVFQAKKRVLEPLGLVEEGAKTAPGKKRPVEQSPQEPDSSSGIGKTGQQPAKKRLNFGQTGDSESVPDPQPLGEPPATPAAVGPTTMASGGGAPMADNNEGADGVGSSSGNWHCDSTWLGDRVITTSTRTWALPTYNNHLYKQISSASTGASNDNHYFGYSTPWGYFDFNRFHCHFSPRDWQRLINNNWGFRPKRLNFKLFNIQVKEVTQNEGTKTIANNLTSTIQVFTDSEYQLPYVLGSAHQGCLPPFPADVFMIPQYGYLTLNNGSQAVGRSSFYCLEYFPSQMLRTGNNFTFSYTFEDVPFHSSYAHSQSLDRLMNPLIDQYLYYLSRTQTTGGTANTQTLGFSQGGPNTMANQAKNWLPGPCYRQQRVSTTTGQNNNSNFAWTAGTKYHLNGRNSLANPGIAMATHKDDKERFFPSNGILIFGKQNAARDNADYSDVMLTSEEEIKTTNPVATEEYGIVADNLQQQNTAPQIGTVNSQGALPGMVWQNRDVYLQGPIWAKIPHTDGNFHPSPLMGGFGLKHPPPQILIKNTPVPADPPTTFNQSKLNSFITQYSTGQVSVEIEWELQKENSKRWNPEIQYTSNYYKSTSVDFAVNTEGVYSEPHPIGTRYLTRPL

SEQ ID NO: 1066 - protein, 736 aa, Artificial Sequence
  source: /note="Description of Artificial Sequence: Synthetic polypeptide"
MAADGYLPDWLEDNLSEGIREWWALKPGAPKPKANQQKQDDGRGLVLPGYKYLGPFNGLDKGEPVNAADAAALEHDKAYDQQLKAGDNPYLRYNHADAEFQERLQEDTSFGGNLGRAVFQAKKRVLEPLGLVEEGAKTAPGKKRPVEQSPQEPDSSSGIGKTGQQPAKKRLNFGQTGDSESVPDPQPLGEPPATPAAVGPTTMAAGGGAPMADNNEGADGVGSSSGNWHCDSTWMGDRVITTSTRTWALPTYNNHLYKQISSASTGASNDNHYFGYSTPWGYFDFNRFHCHFSPRDWQRLINNNWGFRPKRLSFKLFNIQVKEVTQNEGTKTIANNLTSTIQVFTDSEYQLPYVLGSAHQGCLPPFPADVFMIPQYGYLTLNNGSQAVGRSSFYCLEYFPSQMLRTGNNFTFSYTFEDVPFHSSYAHSQSLDRLMNPLIDQYLYYLSRTQTTGGTANTQTLGFSQGGPNTMANQAKNWLQGPCYRQQRVSTTTGQNNNSNFAWTAGTKYHLNGRNSLANPGIAMATHKDDKERFFPSNGILIFGKQNAARDNADYSDVMLTSEEEIKTTNPVATEEYGIVADNLQQQNTAPQIGTVNSQGALPGMVWQNLDVYLQGPIWAKIPHTDGNFHPSPLMGGFGLKHPPPQILIKNTPVPADPPTTFNQSKLNSFITQYSTGQVSVEIEWELQKENSKRWNPEIQYTSNYYKSTSVDFAVNTEGVYSEPHPIGTRYLTRPL

SEQ ID NO: 1067 - protein, 737 aa, Artificial Sequence
  source: /note="Description of Artificial Sequence: Synthetic polypeptide"
MAADGYLPDWLEDNLSEGIREWWALKPGAPKPKANQQKQDDGRGLVLPGYKYLGPFNGLDKGEPVNAADAAALEHDKAYDQQLKAGDNPYLRYNHADAEFQERLQEDTSFGGNLGRAVFQAKKRVLEPLGLVEEGAKTAPGKKRPVEPSPQRSPDSSSGIGKTGQQPAKKRLNFGQTGDSESVPDPQPLGEPPATPAAVGPTTMASGGGAPMADNNEGADGVGNASGNWHCDSQWLGDRVITTSTRTWALPTYNNHLYKQISSASTGASNDNHYFGYSTPWGYFDFNRFHCHFSPRDWQRLINNNWGFRPKRLNFKLFNIQVKEVTDNNGVKTIANNLTSTVQVFTDSDYQLPYVLGSAHEGCLPPFPADVFMIPQYGYLTLNNGSQAVGRSSFYCLEYFPSQMLRTGNNFQFTYTFEDVPFHSSYAHSQSLDRLMNPLIDQYLYYLSRTQTTGGTANTQTLGFSQGGPNTMANQAKNWVPGPCYRQQRVSTATGQNNNSNFAWTAGTKYHLKGRNSLANPGIAMATHKDDKERFFPSNGILIFGKQNAARDNADYSDVMLTSEEEIKTTNPVATEEYGIVADNLQQQNTAPQIGTVNSQGALPGMVWQNRDVYLQGPIWAKIPHTDGNFHPSPLMGGFGLKHPPPQILIKNTPVPADPPTTFNQSKLNSFITQYSTGQVSVEIEWELQKENSKRWNPEIQYTSNYYKSTSVDFAVNTEGVYSEPHPIGTRYLTRPL

SEQ ID NO: 1068 - protein, 737 aa, Artificial Sequence
  source: /note="Description of Artificial Sequence: Synthetic polypeptide"
  MOD_RES (226)..(226): Any naturally occurring amino acid
  MOD_RES (233)..(233): Any naturally occurring amino acid
  MOD_RES (239)..(239): Any naturally occurring amino acid
  MOD_RES (250)..(250): Any naturally occurring amino acid
  MOD_RES (253)..(253): Any naturally occurring amino acid
  MOD_RES (255)..(255): Any naturally occurring amino acid
MAADGYLPDWLEDTLSEGIRQWWKLKPGPPPPKPAERHKDDSRGLVLPGYKYLGPFNGLDKGEPVNEADAAALEHDKAYDRQLDSGDNPYLKYNHADAEFQERLKEDTSFGGNLGRAVFQAKKRVLEPLGLVEEGAKTAPGKKRPVEQSPQEPDSSSGIGKTGQQPAKKRLNFGQTGDSESVPDPQPLGEPPATPSGVGPNTMAAGGGAPMADNNEGADGVGSSSXNWHCDSXWLGDRXITTSTRTWALXTYXNXLYKQISNSTSGGATNDNTYFGYSTPWGYFDFNRFHCHFSPRDWQRLINNNWGFRPKRLNFKLFNIQVKEVTQNEGTKTIANNLTSTIQVFTDSEYQLPYVLGSAHQGCLPPFPADVFMIPQYGYLTLNNGSQAVGRSSFYCLEYFPSQMLRTGNNFQFTYTFEDVPFHSSYAHSQSLDRLMNPLIDQYLYYLSRTQTTGGTANTQTLGFSQGGPNTMANQAKNWLPGPCYRQQRVSTTTGQNNNSNFAWTAGTKYHLNGRNSLANPGIAMATHKDDKERFFPSNGILIFGKQNAARDNADYSDVMLTSEEEIKTTNPVATEEYGIVADNLQQQNTAPQIGTVNSQGALPGMVWQNRDVYLQGPIWAKIPHTDGNFHPSPLMGGFGLKHPPPQILIKNTPVPADPPTTFSQAKLASFITQYSTGQVSVEIEWELQKENSKRWNPEVQYTSNYAKSANVDFTVDNNGLYTEPRPIGTRYLTRPL

SEQ ID NO: 1069 - protein, 737 aa, Artificial Sequence
  source: /note="Description of Artificial Sequence: Synthetic polypeptide"
MAADGYLPDWLEDNLSEGIREWWDLKPGAPKPKANQQKQDDGRGLVLPGYKYLGPFNGLDKGEPVNAADAAALEHDKAYDQQLKAGDNPYLRYNHADAEFQERLQEDTSFGGNLGRAVFQAKKRVLEPLGLVEEGAKTAPGKKRPVEPSPQRSPDSSTGIGKKGQQPAKKRLNFGQTGDSESVPDPQPIGEPPAGPSGVGSLTMASGGGAPVADNNEGADGVGSSSGNWHCDSQWLGDRVITTSTRTWALPTYNNHLYKQISSASTGASNDNHYFGYSTPWGYFDFNRFHCHFSPRDWQRLINNNWGFRPKRLNFKLFNIQVKEVTDNDGVKTIANNLTSTIQVFTDSEYQLPYVLGSAHQGCLPPFPADVFMIPQYGYLTLNNGSQAVGRSSFYCLEYFPSQMLRTGNNFTFSYTFEDVPFHSSYAHSQSLDRLMNPLIDQYLYYLSRTQTTGGTANTQTLGFSQGGPNTMANHAKNWLPGPCYRQQRVSTTTGQNNNSNFAWTAGTKYHLNGRNSLANPGIAMATHKDDKERFFPSNGILIFGKQNAARDNADYSDVMLTSEEEIKTTNPVATEEYGIVADNLQQQNTAPQIGTVNSQGALPGMVWQNRDVYLQGPIWAKIPHTDGNFHPSPLMGGFGLKHPPPQILIKNTPVPADPPTTFNQSKLNSFITQYSTGQVSVEIEWELQKENSKRWNPEIQYTSNYYKSTSVDFAVNTEGVYSEPHPIGTRYLTRPL

SEQ ID NO: 1070 - protein, 736 aa, Artificial Sequence
  source: /note="Description of Artificial Sequence: Synthetic polypeptide"
MAADGYLPDWLEDTLSEGIRQWWKLKPGPPPPKPAERHKDDSRGLVLPGYKYLGPFNGLDKGEPVNEADAAALEHDKAYDRQLDSGDNPYLKYNHADAEFQERLKEDTSFGGNLGRAVFQAKKRVLEPLGLVEEPVKTAPGKKRPVEHSPVEPDSSSGTGKAGQQPAKKRLNFGQTGDSESVPDPQPLGEPPATPAAVGPTTMASGGGAPMADNNEGADGVGNASGNWHCDSTWLGDRVITTSTRTWALPTYNNHLYKQISSASTGASNDNHYFGYSTPWGYFDFNRFHCHFSPRDWQRLINNNWGFRPKRLNFKLFNIQVKEVTQNEGTKTIANNLTSTIQVFTDSEYQLPYVLGSAHQGCLPPFPADVFMIPQYGYLTLNNGSQAVGRSSFYCLEYFPSQMLRTGNNFQFTYTFEDVPFHSSYAHSQSLDRLMNPLIDQYLYYLSRTQTTGGTANTQTLGFSQGGPNTMANQAKNWLPGPCYRQQRVSTTTGQNNNSNFAWTAGTKYHLNGRNSLANPGIAMATHKDDKERFFPSNGILIFGKQNAARDNADYSDVMLTSEEEIKTTNPVATEEYGIVADNLQQQNTAPQIGTVNSQGALPGMVWQNRDVYLQGPIWAKIPHTDGNFHPSPLMGGFGLKHPPPQILIKNTPVPADPPTTFNQSKLNSFITQYSTGQVSVEIEWELQKENSKRWNPEIQYTSNYYKSTSVDFAVNTEGVYSEPHPIGTRYLTRPL

SEQ ID NO: 1071 - protein, 736 aa, Artificial Sequence
  source: /note="Description of Artificial Sequence: Synthetic polypeptide"
MAADGYLPDWLEDNLSEGIREWWALKPGAPKPKANQQKQDDGRGLVLPGYKYLGPFNGLDKGEPVNAADAAALEHDKAYDQQLQAGDNPYLRYNHADAEFQERLQGDTSFGGNLGRAVFQAKKRVLEPLGLVEEGAKTAPGKKRPVEQSPQEPDSSSGIGKTGQQPAKKRLNFGQTGDSESVPDPQPLGEPPATPAAVGPTTMASGGGAPMADNNEGADGVGNASGNWHCDSTWLGDRVITTSTRTWALPTYNNHLYKQISSASTGASNDNHYFGYSTPWGYFDFNRFHCHFSPRDWQRLINNNWGFRPKRLNFKLFNIQVKEVTDNNGVKTIANNLTSTIQVFTDSEYQLPYVLGSAHQGCLPPFPADVFMIPQYGYLTLNNGSQAVGRSSFYCLEYFPSQMLRTGNNFQFTYTFEDVPFHSSYAHSQSLDRLMNPLIDQYLYYLSRTQTTGGTANTQTLGFSQGGPNTMANQAKNWLPGPCYRQQRVSTTTGQNNNSNFAWTAGTKYHLNGRNSLANPGIAMATHKDDKERFFPSNGILIFGKQNAARDNADYSDVMLTSEEEIKTTNPVATEEYGIVADNLQQQNTAPQIGTVNSQGALPGMVWQNRDVYLQGPIWAKIPHTDGNFHPSPLMGGFGLKHPPPQILIKNTPVPADPPTTFNQSKLNSFITQYSTGQVSVEIEWELQKENSKRWNPEIQYTSNYYKSTSVDFAVNTEGVYSEPHPIGTRYLTRPL

SEQ ID NO: 1072 - protein, 738 aa, Artificial Sequence
  source: /note="Description of Artificial Sequence: Synthetic polypeptide"
MAADGYLPDWLEDTLSEGIRQWWKLKPGPPPPKPAERHKDDSRGLVLPGYKYLGPFNGLDKGEPVNAADAAALEHDKAYDQQLKAGDNPYLRYNHADAEFQERLKEDTSFGGNLGRAVFQAKKRVLEPLGLVEEGAKTAPGKKRPVEPSPQRSPDSSTGIGKKGQQPARKRLNFGQTGDSESVPDPQPLGEPPAAPSGVGPNTMAAGGGAPMADNNEGADGVGSSSGNWHCDSQWLGDRVITTSTRTWALPTYNNHLYKQISNSTSGGSSNDNAYFGYSTPWGYFDFNRFHCHFSPRDWQRLINNNWGFRPKRLNFKLFNIQVKEVTDNNGVKTIANNLTSTVQVFTDSEYQLPYVLGSAHQGCLPPFPADVFMIPQYGYLTLNNGSQAVGRSSFYCLEYFPSQMLRTGNNFTFSYTFEDVPFHSSYAHSQSLDRLMNPLIDQYLYYLSRTQTTGGTANTQTLGFSQGGPNTMANQAKNWLPGPCYRQQRVSTTTGQNNNSNFAWTAGTKYHLNGRNSLANPGIAMATHKDDKERFFPSNGILIFGKQNAARDNADYSDVMLTSEEEIKTTNPVATEEYGIVADNLQQQNTAPQIGTVNSQGALPGMVWQNRDVYLQGPIWAKIPHTDGHFHPSPLMGGFGLKHPPPQILIKNTPVPANPPTTFNQSKLNSFITQYSTGQVSVEIEWELQKENSKRWNPEVQYTSNYAKSANVDFTVDNNGLYTEPRPIGTRYLTRPL

SEQ ID NO: 1073 - protein, 738 aa, Artificial Sequence; identical to SEQ ID NO: 1072
  source: /note="Description of Artificial Sequence: Synthetic polypeptide"

SEQ ID NO: 1074 - protein, 736 aa, Artificial Sequence
  source: /note="Description of Artificial Sequence: Synthetic polypeptide"
MAADGYLPDWLEDNLSEGIREWWALKPGAPKPKANQQKQDDGRGLVLPGYKYLGPFNGLDKGEPVNAADAAALEHDKAYDQQLKAGDNPYLRYNHADAEFQERLQEDTSFGGNLGRAVFQAKKRLLEPLGLVEEGAKTAPGKKRPVEQSPQEPDSSSGIGKTGQQPAKKRLNFGQTGDSESVPDPQPLGEPPATPAAVGPTTMASGGGAPMADNNEGADGVGNSSGNWHCDSTWMGDRVITTSTRTWALPTYNNHLYKQISSASTGASNDNHYFGYSTPWGYFDFNRFHCHFSPRDWQRLINNNWGFRPKRLNFKLFNIQVKEVTQNEGTKTIANNLTSTIQVFTDSEYQLPYVLGSAHQGCLPPFPADVFIIPQYGYLTLNNGSQAVGRSSFYCLEYFPSQMLRTGNNFTFSYTFEDVPFHSSYAHSQSLDRLMNPLIDQYLYYLSRTQTTGGTANTQTLGFSQGGPNTMANQAKNWLPGPCYRQQRVSTTTGQNNNSNFAWTAGTKYHLNGRNSLANPGIAMATHKDDKERFFPSNGILIFGKQNAARDNADYSDVMLTSEEEIKTTNPVATEEYGIVADNLQQQNTAPQIGTVNSQGALPGMVWQNRDVYLQGPIWAKIPHTDGNFHPSPLMGGFGLKHPPPQILIKNTPVPADPPTTFNQSKLNSFITQYSTGQVSVEIEWELQKENSKRWNPEIQYTSNYYKSTSVDFAVNTEGVYSEPHPIGTRYLTRPL

SEQ ID NO: 1075 - protein, 736 aa, Artificial Sequence
  source: /note="Description of Artificial Sequence: Synthetic polypeptide"
MAADGYLPDWLEDNLSEGIREWWALKPGAPKPKANQQKQDDGRGLVLPGYKYLGPFNGLDKGEPVNAADAAALEHDKAYDQQLKAGDNPYLRYNHADAEFQERLQEDTSFGGNLGRAVFQAKKRVLEPFGLVEEAAKTAPGKKRPVEQSPQEPDSSSGIGKTGQQPAKKRLNFGQTGDSESVPDPQPLGEPPATPAAVGPTTMASGGGAPMADNNEGADGVGNASGNWHCDSTWLGDRVITTSTRTWALPTYNNHLYKQISSASTGASNDNHYFGYSTPWGYFDFNRFHCHFSPRDWQRLINNNWGFRPKRLNFKLFNIQVKEVTQNEGTKTIANNLTSTIQVFTDSEYQLPYVLGSAHQGCLPPFPADVFMIPQYGYLTLNNGSQAVGRSSFYCLEYFPSQMLRTGNNFTFSYTFEDVPFHSSYAHSQSLDRLMNPLIDQYLYYLSRTQTTGGTANTQTLGFSQGGPNTMANHAKNWLPGPCYRQQRVSTTTGQNNNSNFAWTAGTKYHLNGRNSLANPGIAMATHKDDKERFFPSNGILIFGKQNAARDNADYSDVMLTSEEEIKTTNPVATEEYGIVADNLQQQNTAPQIGTVNSQGALPGMVWQNRDVYLQGPIWAKIPHTDGNFHPSPLMGGFGLKHPPPQILIKNTPVPADPPTTFNQSKLNSFITQYSTGQVSVEIEWELQKENSKRWNPEIQYTSNYYKSTSVDFAVNTEGVYSEPHPIGTRYLTRPL

SEQ ID NO: 1076 - protein, 736 aa, Artificial Sequence
  source: /note="Description of Artificial Sequence: Synthetic polypeptide"
MAADGYLPDWLEDNLSEGIREWWALKPGAPKPKANQQKQDDGRGLVLPGYKYLGPFNGLDKGEPVNEADAAALEHDKAYDQQLKAGDNPYLRYNHADAEFQERLQEDTSFGGNLGRAVFQAKKRLLEPLGLVEEAAKTAPGKKRPVEQSPQEPDSSAGIGKSGAQPAKKRLNFGQTGDSESVPDPQPLGEPPATPAAVGPTTMASGGGAPMADNNEGADGVGNASGNWHCDSTWLGDRVITTSTRTWALPTYNNHLYKQISSASTGASNDNHYFGYSTPWGYFDFNRFHCHFSPRDWQRLINNNWGFRPKRLNFKLFNIQVKEVTDNDGVKTIANNLTSTIQVFTDSEYQLPYVLGSAHQGCLPPFPADVFMIPQYGYLTLNNGSQAVGRSSFYCLEYFPSQMLRTGNNFQFTYTFEDVPFHSSYAHSQSLDRLMNPLIDQYLYYLSRTQTTGGTANTQTLGFSQGGPNTMANQAKNWLPGPCYRQQRVSTTTGQNNNSNFAWTAGTKYHLNGRNSLANPGIAMATHKDDKERFFPSNGILIFGKQNAARDNADYSDVMLTSEEEIKTTNPVATEEYGIVADNLQQQNTAPQIGTVNSQGALPGMVWQNRDVYLQGPIWAKIPHTDGNFHPSPLMGGFGLKHPPPQILIKNTPVPADPPTTFNQSKLNSFITQYSTGQVSVEIEWELQKENSKRWNPEIQYTSNYYKSTSVDFAVNTEGVYSEPHPIGTRYLTRPL

SEQ ID NO: 1077 - protein, 736 aa, Artificial Sequence
  source: /note="Description of Artificial Sequence: Synthetic polypeptide"
MAADGYLPDWLEDNLSEGIREWWALKPGAPKPKANQQKQDDGRGLVLPGYKYLGPFNGLDKGEPVNAADAAALEHDKAYDQQLKAGDNPYLRYNHADAEFQERLQEDTSFGGNLGRAVFQAKKRVLEPLGLVEEGAKTAPGKKRPVEQSPQEPDSSAGIGKTGAQPAKKRLNFGQTGDSESVPDPQPLGEPPATPAAVGPTTMASGGGAPMADNNEGADGVGSASGNWHCDSTWLGDRVITTSTRTWALPTYNNHLYKQISSASTGASNDNHYFGYSTPWGYFDFNRFHCHFSPRDWQRLINNNWGFRPKRLNFKLFNIQVKEVTDNNGVKTIANNLTSTIQVFTDSEYQLPYVLGSAHQGCLPPFPADVFMIPQYGYLTLNNGSQAVGRSSFYCLEYFPSQMLRTGNNFTFSYTFEDVPFHSSYAHSQSLDRLMNPLIDQYLYYLSRTQTTGGTANTQTLGFSQGGPNTMANQAKNWLPGPCYRQQRVSTTTGQNNNSNFAWTAGTKYHLNGRNSLANPGIAMATHKDDKERFFPSNGILIFGKQNAARDNADYSDVMLTSEEEIKTTNPVATEEYGIVADNLQQQNTAPQIGTVNSQGALPGMVWQNRDVYLQGPIWAKIPHTDGNFHPSPLMGGFGLKHPPPQILIKNTPVPADPPTTFNQSKLNSFITQYSTGQVSVEIEWELQKENSKRWNPEIQYTSNYYKSTSVDFAVNTEGVYSEPHPIGTRYLTRPL

SEQ ID NO: 1078 - protein, 736 aa, Artificial Sequence
  source: /note="Description of Artificial Sequence: Synthetic polypeptide"
MAADGYLPDWLEDNLSEGIREWWDLKPGAPKPKANQQKQDDGRGLVLPGYKYLGPFNGLDKGEPVNAADAAALEHDKAYDQQLKAGDNPYLRYNHADAEFQERLQEDTSFGGNLGRAVFQAKKRLLEPLGLVEEAAKTAPGKKRPVEQSPQEPDSSAGIGKSGAQPAKKRLNFGQTGDTESVPDPQPIGEPPAAPSGVGPNTMAAGGGAPMADNNEGADGVGSSSGNWHCDSQWLGDRVITTSTRTWALPTYNNHLYKQISSASTGASNDNHYFGYSTPWGYFDFNRFHCHFSPRDWQRLINNNWGFRPKRLNFKLFNIQVKEVTQNEGTKTIANNLTSTIQVFTDSEYQLPYVLGSAHQGCLPPFPADVFMIPQYGYLTLNNGSQAVGRSSFYCLEYFPSQMLRTGNNFQFTYTFEDVPFHSSYAHSQSLDRLMNPLIDQYLYYLSRTQTTGGTANTQTLGFSQGGPNTMANHAKNWLPGPCYRQQRVSTTTGQNNNSNFAWTAGTKYHLNGRNSLANPGIAMATHKDDKERFFPSNGILIFGKQNAARDNADYSDVMLTSEEEIKTTNPVATEEYGIVADNLQQQNTAPQIGTVNSQGALPGMVWQNRDVYLQGPIWAKIPHTDGNFHPSPLMGGFGLKHPPPQILIKNTPVPADPPTTFNQSKLNSFITQYSTGQVSVEIEWELQKENSKRWNPEIQYTSNYYKSTSVDFAVNTEGVYSEPHPIGTRYLTRPL

SEQ ID NO: 1079 - protein, 737 aa, Artificial Sequence; identical to SEQ ID NO: 1061
  source: /note="Description of Artificial Sequence: Synthetic polypeptide"

SEQ ID NO: 1080 - protein, 737 aa, Artificial Sequence
  source: /note="Description of Artificial Sequence: Synthetic polypeptide"
MAADGYLPDWLEDNLSEGIREWWALKPGAPKPKANQQKQDDGRGLVLPGYKYLGPFNGLDKGEPVNAADAAALEHDKAYDQQLKAGDNPYLRYNHADAEFQERLKEDTSFGGNLGRAVFQAKKRVLEPFGLVEEGAKTAPGKKRPVEQSPQEPDSSSGIGKTGQQPAKKRLNFGQTGDSESVPDPQPLGEPPAAPSGVGPNTMAAGGGAPMADNNEGADGVGSSSGNWHCDSQWLGNRVITTSTRTWALPTYNNHLYKQISNSTSGGSSNDNAYFGYSTPWGYFDFNRFHCHFSPRDWQRLINNNWGFRPKRLNFKLFNIQVKEVTDNNGVKTIANNLTSTVQVFTDSEYQLPYVLGSAHQGCLPPFPADVFMIPQYGYLTLNNGSQAVGRSSFYCLEYFPSQMLRTGNNFQFTYTFEDVPFHSSYAHSQSLDRLMNPLIDQYLYYLSRTQTTGGTANTQTLGFSQGGPNTMANQAKNWLPGPCYRQQRVSTTTGQNNNSNFAWTAGTKYHLNGRNSLANPGIAMATHKDDKERFFPSNGILIFGKQNAARDNADYSDVMLTSEEEIKTTNPVATEEYGIVADNLQQQNTAPQIGTVNSQGALPGMVWQNRDVYLQGPIWAKIPHTDGNFHPSPLMGGFGLKHPPPQILIKNTPVPADPPTTFNQSKLNSFITQYSTGQVSVEIEWELQKENSKRWNPEIQYTSNYYKSTSVDFAVNTEGVYSEPHPIGTRYLTRPL

SEQ ID NO: 1081 - protein, 736 aa, Artificial Sequence
  source: /note="Description of Artificial Sequence: Synthetic polypeptide"
MAADGYLPDWLEDNLSEGIREWWDLKPGAPKPKANQQKQDDGRGLVLPGYKYLGPFNGLDRGEPVNAADAAALEHDKAYDQQLKAGDNPYLRYNHADAEFQERLQEDTSFGGNLGRAVFQAKKRVLEPLGLVEEGAKTAPGKKRPVEQSPQEPDSSSGIGKTGQQPAKKRLNFGQTGDSESVPDPQPLGEPPATPAAVGPTTMASGGGAPMADNNEGADGVGNASGNWHCDSTWLGDRVITTSTRTWALPTYNNHLYKQISSASTGASNDNHYFGYSTPWGYFDFNRFHCHFSPRDWQRLINNNWGFRPKRLNFKLFNIQVKEVTDNNGVKTIANNLTSTIQVFTDSEYQLPYVLGSAHQGCLPPFPADVFMIPQYGYLTLNNGSQAVGRSSFYCLEYFPSQMLRTGNNFQFTYTFEDVPFHSSYAHSQSLDRLMNPLIDQYLYYLSRTQTTGGTANTQTLGFSQGGPNTMANQAKNWLPGPCYRQQRVSTTTGQNNNSNFAWTAGTKYHLNGRNSLANPGIAMATHKDDKERFFPSNGILIFGKQNAARDNADYSDVMLTSEEEIKTTNPVATEEYGIVADNLQQQNTAPQIGTVNSQGALPGMVWQNRDVYLQGPIWAKIPHTDGNFHPSPLMGGFGLKHPPPQILIKNTPVPADPPTTFNQSKLNSFITQYSTGQVSVEIEWELQKENSKRWNPEIQYTSNYYKSTSVDFAVNTEGVYSEPHPIGTRYLTRPL

SEQ ID NO: 1082 - protein, 736 aa, Artificial Sequence
  source: /note="Description of Artificial Sequence: Synthetic polypeptide"
MAADGYLPDWLEDNLSEGIREWWDLKPGAPKPKANQQKQDDGRGLVLPGYKYLGPFNGLDKGEPVNAADAAALEHDKAYDQQLKAGDNPYLRYNHADAEFQERLQEDTSFGGNLGRAVFQAKKRVLEPLGLVEEGAKTAPGKKRPVEQSPQEPDSSSGIGKKGQQPARKRLNFGQTGDSESVPDPQPLGEPPAAPSGVGSLTMASGGGAPMADNNEGADGVGNASGNWHCDSTWLGDRVITTSTRTWALPTYNNHLYKQISSASTGASNDNHYFGYSTPWGYFDFNRFHCHFSPRDWQRLINNNWGFRPKRLNFKLFNIQVKEVTQNEGTKTIANNLTSTVQVFTDSDYQLPYVLGSAHQGCLPPFPADVFMIPQYGYLTLNNGSQAVGRSSFYCLEYFPSQMLRTGNNFQFTYTFEDVPFHSSYAHSQSLDRLMNPLIDQYLYYLSRTQTTGGTANTQTLGFSQGGPNTMANQAKNWLPGPCYRQQRVSTTTGQNNNSNFAWTAGTKYHLNGRNSLSNPGIAMATHKDDKERFFPSNGILIFGKQNAARDNADYSDVMLTSEEEIKTTNPVATEEYGIVADNLQQQNTAPQIGTVNSQGALPGMVWQNRDMYLQGPIWAKIPHTDGNFHPSPLMGGFGLKHPPPQILIKNTPVPADPPTTFNQSKLNSFITQYSTGQVSVEIEWELQKENSKRWNPEIQYTSNYYKSTSVDFAVNTEGVYSEPHPIGTRYLTRPL

SEQ ID NO: 1083 - protein, 736 aa, Artificial Sequence
  source: /note="Description of Artificial Sequence: Synthetic polypeptide"
MAADGYLPDWLEDNLSEGIREWWALKPGAPKPKANQQKQDDGRGLVLPGYKYLGPFNGLDKGEPVNAADAAALEHDKAYDQQLKAGDNPYLRYNHADAEFQERLQEDTSFGGNLGRAVFQAKKRVLEPFGLVEEGAKTAPGKKRPVEQSPQEPDSSSGIGKTGQQPAKKRLNFGQTGGSESVPDPQPLGEPPATPAAVGPTTMAAGGGAPMADNNEGADGVGSSSGNWHCDSTWLGDRVITTSTRTWALPTYNNHLYKQISSASTGASNDNHYFGYSTPWGYFDFNRFHCHFSPRDWQRLINNNWGFRPKRLNFKLFNIQVKEVTDNNGVKTIANNLTSTVQVFTDSEYQLPYVLGSAHQGCLPPFPADVFMIPQYGYLTLNNGSQAVGRSSFYCLEYFPSQMLRTGNNFTFSYTFEEVPFHSSYAHSQSLDRLMNPLIDQYLYYLSRTQTTGGTANTQTLGFSQGGPNTMANQAKNWLPGPCYRQQRVSTTTGQNNNSNFAWTAGTKYHLNGRNSLANPGIAMASHKDDKERFFPSNGILIFGKQNAARDNADYSDVMLTSEEEIKTTNPVATEEYGIVADNLQQQNTAPQIGTVNSQGALPGMVWQNRDVYLQGPIWAKIPHTDGNFHPSPLMGGFGLKHPPPQILIKNTPVPADPPTTFNQSKLNSFITQYSTGQVSVEIEWELQKENSKRWNPEIQYTSNYYKSTSVDFAVNTEGVYSEPHPIGTRYLTRPL

SEQ ID NO: 1084 - DNA, 2211 bp, Artificial Sequence
  source: /note="Description of Artificial Sequence: Synthetic polynucleotide"
atggctgccgatggttatcttccagattggctcgaggacaacctctctgagggcattcgcgagtggtgggacttgaaacctgcatccccgaaacccaaagccaaccagcaaaagcaggacgacggccggggtctggtgcttcctggctacaagtacctcggacccttcaacggactcgacaagggggagcccgtcaacgcggcggacgcagcggccctcgagcacgacaaggcctacgaccagcagctcaaagcgggtgacaatccgtacctgcggtataaccacgccgacgccgagtttcaggagcgtctgcaagaagatacgtcttttgggggcaacctcgggcgagcagtcttccaggccaaaaagaggcttcttgaacctcttggtctggttgaggaagcggctaagacggctcctggaaagaagaggcctgtagagcagtctcctcaggaaccggactcctccgcgggtattggcaaatcgggtgcacagcccgccaaaaagagactcaatttcggtcagactggcggcacagagtcagttccagaccctcaacctctcggagaacctccagcagcgccctctggtgtgggacctaatacaatggctgcaggcggtggcgcaccaatggcagacaataacgaaggcgccgacggagtgggtagttcctcgggaaattggcattgcgattccacatggctgggcgacagagtcatcaccaccagcaccagaacctgggccctgcccacttacaacaaccatctctacaagcaaatctccagtgcttcaacgggggccagcaacgacaaccactacttcggctacagcaccccctgggggtattttgatttcaacagattccactgccacttctcaccacgtgactggcagcgactcatcaacaacaactggggattccggcccaagagactcagcttcaagctcttcaacatccaggtcaaggaggtcacgcagaatgaaggcaccaagaccatcgccaataacctcaccagcaccatccaggtgtttacggactcggagtaccagctgccgtacgttctcggctctgcccaccagggctgcctgcctccgttcccggcggacgtgttcatgattccccagtacggatacctaacactcaacaacggtagtcaggccgtgggacgctcctccttctactgcctggaatactttccttcgcagatgctgagaaccggcaacaacttccagtttacttacaccttcgaggacgtgcctttccacagcagctacgcccacagccagagcttggaccggctgatgaatcctctgattgaccagtacctgtactacttgtctcggactcaaacaacaggaggcacggcaaatacgcagactctgggcttcagccaaggtgggcctaatacaatggccaatcaggcaaagaactggctgccaggaccctgttaccgccaacaacgcgtctcaacgacaaccgggcaaaacaacaatagcaactttgcctggactgctgggaccaaataccatctgaatggaagaaattcattggctaatcctggcatcgctatggcaacacacaaagacgacaaggagcgtttttttcccagtaacgggatcctgatttttggcaaacaaaatgctgccagagacaatgcggattacagcgatgtcatgctcaccagcgaggaagaaatcaaaaccactaaccctgtggctacagaggaatacggtatcgtggcagataacttgcagcagcaaaacacggctcctcaaattggaactgtcaacagccagggggccttacccggtatggtctggcagaaccgggacgtgtacctgcagggtcccatctgggccaagattcctcacacggacggcaacttccacccgtctccgctgatgggcggctttggcctgaaacatcctccgcctcagatcctgatcaagaacacgcctgtacctgcggatcctccgaccaccttcaaccagtcaaagctgaactctttcatcacgcaatacagcaccggacaggtcagcgtggaaattgaatgggagctgcagaaggaaaacagcaagcgctggaaccccgagatccagtacacctccaactactacaaatctacaagtgtggactttgctgttaatacagaaggcgtgtactctgaaccccaccccattggcacccgttacctcacccgtcccctgtaa

SEQ ID NO: 1085 - DNA, 2211 bp, Artificial Sequence
  source: /note="Description of Artificial Sequence: Synthetic polynucleotide"
atggctgccgatggttatcttccagattggctcgaggacaacctctctgagggcattcgcgagtggtgggacttgaaacctggagccccgaaacccaaagccaaccagcaaaagcaggacgacggccggggtctggtgcttcctggctacaagtacctcggacccttcaacggactcgacaagggggagcccgtcaacgcggcggacgcagcggccctcgagcacgacaaggcctacgaccagcagctcaaagcgggtgacaatccgtacctgcggtataaccacgccgacgccgagtttcaggagcgtctgcaagaagatacgtcttttgggggcaacctcgggcgagcagtcttccaggccaagaagagggttctcgaaccttttggtctggttgaggaaggcgctaagacggctcctggaaagaaacgtccggtagagcagtcgccacaagagccagactcctcctcgggcattggcaagacaggccagcagcccgctaaaaagagactcaattttggtcagactggcgactcagagtcagtccccgacccacaacctctcggagaacctccagcaacccccgctgctgtgggacctactacaatggcttcaggtggtggcgcaccaatggcagacaataacgaaggcgccgacggagtgggtaatgcctcaggaaattggcattgcgattcccaatggctgggggacagagtcatcaccaccagcacccgaacctgggccctgcccacctacaacaatcacctctacaagcaaatctccagtgcttcaacgggggccagcaacgacaaccactacttcggctacagcaccccctgggggtattttgatttcaacagattccactgccatttctcaccacgtgactggcagcgactcatcaacaacaattggggattccggcccaagagactcaacttcaaactcttcaacatccaagtcaaggaggtcacgcagaatgaaggcaccaagaccatcgccaataacctcaccagcaccatccaggtgtttacggactcggagtaccagctgccgtacgttctcggctccgcccaccagggctgcctgcctccgttcccggcggacgtgttcatgattccccagtacggctacctaacactcaacaacggtagtcaggccgtgggacgctcctccttctactgcctggaatactttccttcgcagatgctgagaaccggcaacaacttccagtttacttacaccttcgaggacgtgcctttccacagcagctacgcccacagccagagcttggaccggctgatgaatcctctgattgaccagtacctgtactacttgtctcggactcaaacaacaggaggcacggcaaatacgcagactctgggcttcagccaaggtgggcctaatacaatggccaatcaggcaaagaactggctgccaggaccctgttaccgccaacaacgcgtctcaacgacaaccgggcaaaacaacaatagcaactttgcctggactgctgggaccaaataccatctgaatggaagaaattcattggctaatcctggcatcgctatggcaacacacaaagacgacaaggagcgtttttttcccagtaacgggatcctgatttttggcaaacaaaatgctgccagagacaatgcggattacagcgatgtcatgctcaccagcgaggaagaaatcaaaaccactaaccctgtggctacagaggaatacggtatcgtggcagataacttgcagcagcaaaacacggctcctcaaattggaactgtcaacagccagggggccttacccggtatggtctggcagaaccgggacgtgtacctgcagggtcccatctgggccaagattcctcacacggacggcaacttccacccgtctccgctgatgggcggctttggcctgaaacatcctccgcctcagatcctgatcaagaacacgcctgtacctgcggatcctccgaccaccttcaaccagtcaaagctgaactctttcatcacgcaatacagcaccggacaggtcagcgtggaaattgaatgggagctgcagaaggaaaacagcaagcgctggaaccccgagatccagtacacctccaactactacaaatctacaagtgtggactttgctgttaatacagaaggcgtgtactctgaaccccaccccattggcacccgttacctcacccgtcccctgtaa

SEQ ID NO: 1086 - DNA, 2211 bp, Artificial Sequence
  source: /note="Description of Artificial Sequence: Synthetic polynucleotide"
atggctgccgatggttatcttccagattggctcgaggacaacctctctgagggcattcgcgagtggtgggacttggaacctggagccccgaagcccaaagccaaccagcaaaagcaggacgacggccggggtctggtgcttcctggctacaagtacctcggacccttcaacggactcgacaagggggagcccgtcaacgcggcggacgcagcggccctcgagcacgacaaggcctacgaccagcagctcaaagcgggtgacaatccgtacctgcggtataaccacgccgacgccgagtttcaggagcgtctgcaagaagatacgtcttttgggggcaacctcgggcgagcagtcttccaggccaagaagcgggttctcgaacctctcggtctggttgaggaaggcgctaagacggctcctggaaagaaacgtccggtagagcagtcgccacaagagccagactcctcctcgggcatcggcaagacaggccagcagcccgctaaaaagagactcaattttggtcagactggcgactcagagtcagtccccgatccacaacctctcggagaacctccagcaacccccgctgctgtgggacctactacaatggcttcaggcggtggcgcaccaatggcagacaataacgaaggcgccgacggagtgggtaatgcctcaggaaattggcattgcgattccacatggctgggcgacagagtcatcaccaccagcacccgcacctgggccttgcccacctacaataaccacctctacaagcaaatctccagtgcttcaacaggggccagcaacgacaaccactacttcggctacagcaccccctgggggtattttgacttcaacagattccactgccacttctcaccacgtgactggcagcgactcatcaacaacaactggggattccggcctaagcgactcaacttcaagctcttcaacattcaggtcaaagaggttacggacaacaatggagtcaagaccatcgccaataaccttaccagcacggtccaggtcttcacggactcggagtaccagttgccgtacgtcctcggctctgcgcaccagggctgcctccctccgttcccggcggacgtgttcatgattccgcagtacggctacctaacgctcaacaacggtagtcaggccgtgggacgctcctccttctactgcctggaatactttccttcgcagatgctgagaaccggcaacaacttccagtttacttacaccttcgaggacgtgcctttccacagcagctacgcccacagccagagcttggaccggctgatgaatcctctgattgaccagtacctgtactacttgtctcggactcaaacaacaggaggcacggcaaatacgcagactctgggcttcagccaaggtgggcctaatacaatggccaatcaggcaaagaactggctgccaggaccctgttaccgccaacaacgcgtctcaacgacaaccgggcaaaacaacaatagcaactttgcctggactgctgggaccaaataccatctgaatggaagaaattcattggctaatcctggcatcgctatggcaacacacaaagacgacaaggagcgtttttttcccagtaacgggatcctgatttttggcaaacaaaatgctgccagagacaatgcggattacagcgatgtcatgctcaccagcgaggaagaaatcaaaaccactaaccctgtggctacagaggaatacggtatcgtggcagataacttgcagcagcaaaacacggctcctcaaattggaactgtcaacagccagggggccttacccggtatggtctggcagaaccgggacgtgtacctgcagggtcccatctgggccaagattcctcacacggacggcaacttccacccgtctccgctgatgggcggctttggcctgaaacatcctccgcctcagatcctgatcaagaacacgcctgtacctgcggatcctccgaccaccttcaaccagtcaaagctgaactctttcatcacgcaatacagcaccggacaggtcagcgtggaaattgaatgggagctgcagaaggaaaacagcaagcgctggaaccccgagatccagtacacctccaactactacaaatctacaagtgtggactttgctgttaatacagaaggcgtgtactctgaaccccaccccattggcacccgttacctcacccgtcccctgtaa

SEQ ID NO: 1087 - DNA, 2211 bp, Artificial Sequence
  source: /note="Description of Artificial Sequence: Synthetic polynucleotide"
atggctgccgatggttatcttccagattggctcgaggacactctctctgaaggaataagacagtggtggaagctcaaacctggcccaccaccaccaaagcccgcagagcggcataaggacgacagcaggggtcttgtgcttcctgggtacaagtacctcggacccttcaacggactcgacaagggagagccggtcaacgaggcagacgccgcggccctcgagcacgacaaagcctacgaccggcagctcgacagcggagacaacccgtacctcaagtacaaccacgccgacgcggagtttcaggagcgccttaaagaagatacgtcttttgggggcaacctcgggcgagcagtcttccaggccaagaagagggttctcgaaccttttggtctggttgaggaaggtgctaagacggctcctggaaagaaacgtccggtagagcagtcgccacaagagccagactcctcctcgggcattggcaagacaggccagcagcccgctaaaaagagactcaattttggtcagactggcgactcagagtcagtccccgacccacaacctctcggagaacctccagcaacccccgctgctgtgggacctactacaatggcttcaggcggtggcgcaccaatggcagacaataacgaaggcgccgacggagtgggtaatgcctcaggaaattggcattgcgattccacatggctgggcgacagagtcatcaccaccagcacccgaacatgggccttgcccacctataacaaccacctctacaagcaaatctccagtgcttcaacgggggccagcaacgacaaccactacttcggctacagcaccccctgggggtattttgacttcaacagattccactgccacttctcaccacgtgactggcagcgactcatcaacaacaactggggattccggcctaagcgactcaacttcaagctcttcaacattcaggtcaaagaggttacggacaacaatggagtcaagaccatcgccaataaccttaccagcacggtccaggtcttcacggactcagactatcagctcccgtacgtgctcgggtcggctcacgagggctgcctcccgccgttcccagcggacgttttcatgattcctcagtacggctacctaacactcaacaacggtagtcaggccgtgggacgctcctccttctactgcctggaatactttccttcgcagatgctgagaaccggcaacaacttccagtttacttacaccttcgaggacgtgcctttccacagcagctacgcgcacagccagagtctggaccggctgatgaatcctctgattgaccagtacctgtactacttgtctcggactcaaacaacaggaggcacggcaaatacgcagactctgggcttcagccaaggtgggcctaatacaatggccaatcaggcaaagaactggctgccaggaccctgttaccgccaacaacgcgtctcaacgacaaccgggcaaaacaacaatagcaactttgcctggactgctgggaccaaataccatctgaatggaagaaattcattggctaatcctggcatcgctatggcaacacacaaagacgacaaggagcgtttttttcccagtaacgggatcctgattttcggcaaacaaaatgctgccagagacaatgcggattacagcgatgtcatgctcaccagcgaggaagaaatcaaaaccactaaccctgtggctacagaggaatacggtatcgtggcagataacttgcagcagcaaaacacggctcctcaaattggaactgtcaacagccagggggccttacccggtatggtctggcagaaccgggacgtgtacctgcagggtcccatctgggccaagattcctcacacggacggcaacttccacccgtctccgctgatgggcggctttggcctgaaacatcctccgcctcagatcctgatcaagaacacgcctgtacctgcggatcctccgaccaccttcaaccagtcaaagctgaactctttcatcacgcaatacagcaccggacaggtcagcgtggaaattgaatgggagctgcagaaggaaaacagcaagcgctggaaccccgagatccagtacacctccaactactacaaatctacaagtgtggactttgctgttaatacagaaggcgtgtactctgaaccccaccccattggcaccagatacctgactcgtaatctgtaa

SEQ ID NO: 1088 - DNA, 2208 bp, Artificial Sequence
  source: /note="Description of Artificial Sequence: Synthetic polynucleotide"
atggctgccgatggttatcttccagattggctcgaggacactctctctgaaggaataagacagtggtggaagctcaaacctggcccaccaccaccaaagcccgcagagcggcataaggacgacagcaggggtcttgtgcttcctgggtacaagtacctcggacccttcaacggactcgacaagggagagccggtcaacgaggcagacgccgcggccctcgagcacgacaaagcctacgaccggcagctcgacagcggagacaacccgtacctcaagtacaaccacgccgacgcggagtttcaggagcgccttaaagaagatacgtcttttgggggcaacctcggacgagcagtcttccaggcgaaaaagagggttcttgaacctctgggcctggttgaggaacctgttaagacggctccgggaaaaaagaggccggtagagcagtcgccacaagagccagactcctcctcgggcatcggcaagaaaggccagcagcccgctaaaaagagactcaattttggtcagactggcgactcagagtcagtccccgacccacaacctctcggagaacctccagcaacccccgctgctgtgggacctactacaatggcttcaggcggtggcgcaccaatggcggacaataacgaaggcgccgatggagtgggtaatgcctcaggaaattggcattgcgattccacatggctgggcgacagagtcatcaccaccagcacccgaacatgggccttgcccacctataacaaccacctctacaagcaaatctccagtgcttcaacgggggccagcaacgacaaccactacttcggctacagcaccccctgggggtattttgacttcaacagattccactgccacttctcaccacgtgactggcagcgactcatcaacaacaactggggattccggcctaagcgactcaacttcaagctcttcaacattcaggtcaaagaggttacggacaacaatggagtcaagaccatcgccaataaccttaccagcacggtccaggtcttcacggactcagactatcagctcccgtacgttctcggctctgcccaccagggctgcctgcctccgttcccggcggacgtgttcatgattccccagtacggctacctaacactcaacaacggtagtcaggccgtgggacgctcctccttctactgcctggaatactttccttcgcagatgctgagaaccggcaacaacttccagtttacttacaccttcgaggacgtgcctttccacagcagctacgcccacagccagagcttggaccggctgatgaatcctctgattgaccagtacctgtactacttgtctcggactcaaacaacaggaggcacggcaaatacgcagactctgggcttcagccaaggtgggcctaatacaatggccaatcaggcaaagaactggctgccaggaccctgttaccgccaacaacgcgtctcaacgacaaccgggcaaaacaacaatagcaactttgcctggactgctgggaccaaataccatctgaatggaagaaattcattggctaatcctggcatcgctatggcaacacacaaagacgacaaggagcgtttttttcccagtaacgggatcctgatttttggcaaacaaaatgctgccagagacaatgcggattacagcgatgtcatgctcaccagcgaggaagaaatcaaaaccactaaccctgtggctacagaggaatacggtatcgtggcagataacttgcagcagcaaaacacggctcctcaaattggaactgtcaacagccagggggccttacccggtatggtctggcagaaccgggacgtgtacctgcagggtcccatctgggccaagattcctcacacggacggcaacttccacccgtctccgctgatgggcggctttggcctgaaacatcctccgcctcagatcctgatcaagaacacgcctgtacctgcggatcctccgaccaccttcaaccagtcaaagctgaactctttcatcacgcaatacagcaccggacaggtcagcgtggaaattgaatgggagctgcagaaggaaaacagcaagcgctggaaccccgagatccagtacacctccaactactacaaatctacaagtgtggactttgctgttaatacagaaggcgtgtactctgaaccccaccccattggcacccgttacctcacccgtcccctg

SEQ ID NO: 1089 - DNA, 2211 bp, Artificial Sequence
  source: /note="Description of Artificial Sequence: Synthetic polynucleotide"
atggctgccgatggttatcttccagattggctcgaggacactctctctgaaggaataagacagtggtggaagctcaaacctggcccaccaccaccaaagcccgcagagcggcataaggacgacagcaggggtcttgtgcttcctgggtacaagtacctcggacccttcaacggactcgacaagggagagccggtcaacgaggcagacgccgcggccctcgagcacgacaaagcctacgaccagcagctccaagcgggtgacaatccgtacctgcggtataaccacgccgacgccgagtttcaggagcgtcttcaaggagatacgtcttttgggggcaacctcggacgagcagtcttccaggccaaaaagaggcttcttgaacctcttggtctggttgaggaagcggctaagacggctcctggaaagaagaggcctgtagagcagtctcctcaggaaccggactcctccgcgggtattggcaaatcgggtgcacagcccgctaaaaagagactcaatttcggtcagactggcgacacagagtcagtcccagaccctcaaccaatcggagaacctcccgcagccccctcaggtgtgggatctcttacaatggcttcaggtggtggcgcaccagtggcagacaataacgaaggtgccgatggagtgggtagttcctcgggaaattggcattgcgattcccaatggctgggggacagagtcatcaccaccagcacccgaacatgggccttgcccacctataacaaccacctctacaagcaaatctccagtgcttcaacgggggccagcaacgacaaccactacttcggctacagcaccccctgggggtattttgacttcaaccgcttccactgccacttctcaccacgtgactggcagcgactcatcaacaacaactggggattccggcccaagagactcagcttcaagctcttcaaccatccaggtcaaggaggtcacgcagaatgaaggcaccaagaccatcgccaataacctcaccagcacatccaggtgtttacggactcggagtaccagctgccgtacgttctcggctctgcccaccagggctgcctgcctccgttcccggcggacgtgttcatgattccccagtacggctacctaacactcaacaacggtagtcaggccgtgggacgctcctccttctactgcctggaatactttccttcgcagatgctgagaaccggcaacaacttccagttcacttacaccttcgaggacgtgcctttccacagcagctacgcgcacagccagagcttggaccggctgatgaatcctctgattgaccagtacctgtactacttgtctcggactcaaacaacaggaggcacggcaaatacgcagactctgggcttcagccaaggtgggcctaatacaatggccaatcaggcaaagaactggctgccaggaccctgttaccgccaacaacgcgtctcaacgacaaccgggcaaaacaacaatagcaactttgcctggactgctgggaccaaataccatctgaatggaagaaattcattgggtaatcctggcatcgctatggcaacacacaaagacgacaaggagcgtttttttcccagtaacgggatcctgatttttggcaaacaaaatgctgccagagacaatgcggattacagcgatgtcatgctcaccagcgaggaagaaatcaaaaccactaaccctgtggctacagaggaatacggtatcgtggcagataacttgcagcagcaaaacacggctcctcaaattggaactgtcaacagccagggggccttacccggtatggtctggcagaaccgggacgtgtacctgcagggtcccatctgggccaagattcctcacacggacggcaacttccacccgtctccgctgatgggcggctttggcctgaaacatcctccgcctcagatcctcatcaaaaacacacctgtacctgcggatcctccaacggccttcaaccagtcaaagctgaactctttcatcacgcaatacagcaccggacaggtcagcgtggaaattgaatgggagctgcagaaggaaaacagcaagcgctggaaccccgagatccagtacacctccaactactacaaatctacaagtgtggactttgctgttaatacagaaggcgtgtactctgaaccccaccccattggcacccgttacctcacccgtcccctgtaa

SEQ ID NO: 1090 - DNA, 2214 bp, Artificial Sequence
  source: /note="Description of Artificial Sequence: Synthetic polynucleotide"
atggctgccgatggttatcttccagattggctcgaggacaacctctctgagggcattcgcgagtggtgggacttgaaacatggagccccgaaacccaaagccaaccagcaaaagcaggacgacggccggggtctggtgcttcctggctacaagtacctcggacccttcaacggactcgacaagggggagcccgtcaacgcggcggatgcagcggccctcgagcacgacaaggcctacgaccagcagctcaaagcgggtgacaatccgtacctgcggtataaccacgccgacgccgagtttcaggagcgtctgcaagaagatacgtcttttgggggcaacctcgggcgagcagtcttccaggccaagaagagggttctcgaaccttttggtctggttgaggaaggtgctaagacggctcctggaaagaaacgtccggtagagcagtcgccacaagagccagactcctcctcgggcattggcaagacaggccagcagcccgctaaaaagagactcaattttggtcagactggcgactcagagtcagtccccgacccacaacctctcggagaacctccagcaacccccgctgctgtgggacctactacaatggcttcaggcggtggcgcaccaatggcagacaataacgaaggcgccgacggagtgggtaatgcctcaggaaattggcattgcgattccacatggctgggcgacagagtcatcaccaccagcacccgaacatgggccttgcccacctataacaaccacctctacaagcaaatctccaacgggacttcgggaggaagcaccaacgacaacacctacttcggctacagcaccccctgggggtattttgactttaacagattccactgccacttctcaccacgtgactggcagcgactcatcaacaacaactggggattccggcccaagagactcaacttcaaactcttcaacatccaagtcaaggaggtcacgcagaatgaaggcaccaagaccatcgccaataacctcaccagcaccatccaggtgtttacggactcggagtaccagctgccgtacgttctcggctccgcccaccagggctgcctgcctccgttcccggcggacgtgttcatgattccccagtacggctacctaacactcaacaacggtagtcaggccgtgggacgctcctccttctactgcctggaatactttccttcgcagatgctgagaacgggcaacaactttaccttcagctacacctttgaggacgttcctttccacagcagctacgctcacagccagagtctggaccgtctcatgaatcctctgattgaccagtacctgtactacttgtctcggactcaaacaacaggaggcacggcaaatacgcagactctgggcttcagccaaggtgggcctaatacaatggccaatcaggcaaagaactggctgccaggaccctgttaccgccaacaacgcgtctcaacgacaaccgggcaaaacaacaatagcaactttgcctggactgctgggaccaaataccatctgaatggaagaaattcattggctaatcctggcatcgctatggcaacacacaaagacgacaaggagcgtttttttcccagtaacgggatcctgatttttggcaaacaaaatgctgccagagacaatgcggattacagcgatgtcatgctcaccagcgaggaagaaatcaaaaccactaaccctgtggctacagaggaatacggtatcgtggcagataacttgcagcagcaaaacacggctcctcaaattggaactgtcaacagccagggggccttacccggtatggtctggcagaaccgggacgtgtacctgcagggtcccatctgggccaagattcctcacacggacggcaacttccacccgtctccgctgatgggcggctttggcctgaaacatcctccgcctcagatcctgatcaagaacacgcctgtacctgcggatcctccgaccaccttcaaccagtcaaagctgaactctttcatcacgcaatacagcaccggacaggtcagcgtggaaattgaatgggagctgcagaaggaaaacagcaagcgctggaaccccgagatccagtacacctccaactactacaaatctacaagtgtggactttgctgttaatacagaaggcgtgtactctgatccccaccccattggcacccgttacctcacccgtcccctgtaa

SEQ ID NO: 1091 - DNA, 2214 bp, Artificial Sequence
  source: /note="Description of Artificial Sequence: Synthetic polynucleotide"
atggctgccgatggttatcttccagattggctcgaggacaacctctctgagggcattcgcgagtggtgggcgctgaaacctggagccccgaagcccaaagccaaccagcaaaagcaggacgacggccggggtctggtgcttcctggctacaagtacctcggacccttcaacggactcgacaaaggagagccggtcaacgaggcggacgcggcagccctcgaacacgacaaggcctacgaccagcagctcaaagcgggtgacaatccgtacctgcggtataaccacgccgacgccgagtttcaggagcgtctgcaagaagatacgtcttttgggggcaacctcgggcgagcagtcttccaggccaagaagcgggttctcgaacctctcggtctggttgaggaaggcgctaagacggctcctggaaagaagagaccggtagagccatcaccccagcgttctccagactcctctacgggcatcggcaagaaaggccagcagcccgccagaaaaagactcaattttggtcagactggcgactcagagtcagttccagaccctcaacctctcggagaacctccagcagcgccctctggtgtgggacctaatacaatggcttcaggcggtggcgcaccaatggcagacaataacgagggcgccgacggagtgggtaattcctcgggaaattggcattgcgattccacatggatgggcgacagagtcatcaccaccagcacccgaacctgggccctgcccacctacaacaaccacctctacaagcaaatctccagtgcttcaacgggggccagcaacgacaaccactacttcggctacagcaccccctgggggtattttgactttaacagattccactgccacttttcaccacgtgactggcagcgactcatcaacaacaactggggattccggcccaagagactcaacttcaagctcttcaacatccaagtcaaggaggtcacgcagaatgaaggcaccaagaccatcgccaataacctcaccagcaccatccaggtgtttacggactcggagtaccagctgccgtacgttctcggctctgcccaccagggctgcctgcctccgttcccggcggacgtgttcatgattccccagtacggctacctaacactcaacaacggtagtcaggccgtgggacgctcctccttctactgcctggaatactttccttcgcagatgctgagaaccggcaacaacttccagtttacttacaccttcgaggacgtgcctttccacagcagctacgcgcacagccagagcttggaccggctgatgaatcctctgattgaccagtacctgtactacttgtctcggactcaaacaacaggaggcacggcaaatacgcagactctgggcttcagccaaggtgggcctaatacaatggccaatcaggcaaagaactggctgccaggaccctgttaccgccaacaacgcgtctcaacgacaaccgggcaaaacaacaatagcaactttgcctggactgctgggaccaaataccatctgaatggaagaaattcattggctaatcctggcatcgctatggcaacacacaaagacgacaaggagcgtttttttcccagtaacgggatcctgatttttggcaaacaaaatgctgccagagacaatgcggattacagcgatgtcatgctcaccagcgaggaagaaatcaaaaccactaaccctgtggctacagaggaatacggtatcgtggcagataacttgcagcagcaaaacacggctcctcaaattggaactgtcaacagccagggggccttacccggtatggtctggcagaaccgggacgtgtacctgcagggtcccatctgggccaagattcctcacacggacggcaacttccacccgtctccgctgatgggcggctttggcctgaaacatcctccgcctcagatcctgatcaagaacacgcctgtacctgcggatcctccgaccaccttcaaccagtcaaagctgaactctttcatcacacaatacagcaccggacaggtcagcgtggaaattgaatgggagctgcagaaggaaaacagcaagcgctggaaccccgagatccagtacacctccaactactacaaatctacaagtgtggactttgctgttaatacagaaggcgtgtactctgaaccccaccccattggcacccgttacctcacccgtcccctgtaa

SEQ ID NO: 1092 - DNA, 2211 bp, Artificial Sequence
  source: /note="Description of Artificial Sequence: Synthetic polynucleotide"
  modified_base (676)..(676): a, c, t, or g
atggctgccgatggttatcttccagattggctcgaggacactctctctgaaggaataagacagtggtggaagctcaaacctggcccaccaccaccaaagcccgcagagcggcataaggacgacagcaggggtcttgtgcttcctgggtacaagtacctcggacccttcaacggactcgacaagggagagccggtcaacgaggcagacgccgcggccctcgagcacgacaaagcctacgaccggcagctcgacagcggagacaacccgtacctcaagtacaaccacgccgacgcggagtttcaggagcgccttaaagaagatacgtcttttgggggcaacctcggacgagcagtcttccaggcgaaaaagagggttcttgaacctctgggcctggttgaggaacctgttaagacggctccgggaaaaaagaggccggtagagcagtcgccacaagagccagactcctcctcgggcatcggcaagaaaggccagcagcccgctaaaaagagactcaattttggtcagactggcgactcagagtcagtccccgacccacaacctctcggagaacctccagcaacccccgctgctgtgggacctactacaatggcttcaggcggtggcgcaccaatggcggacaataacgaaggcgccgatggagtgggtaatgcctcangaaattggcattgcgattccacatggctgggcgacagagtcatcaccaccagcacccgaacatgggccttgccacctataacaaccacctctacaagcaaatctccagtgcttcaacgggggcgcagcaacgacaaccactacttcggctacagcaccccctgggggtattttgacttcaacagattccactgccacttctcaccacgtgactggcagcgactcatcaacaacaactggggattccggcctaagcgactcaacttcaagctcttcaacattcaggtcaaagaggttacggacaacaatggagtcaagaccatcgccaataaccttaccagcacggtccaggtcttcacggactcagactatcagctcccgtacgttctcggctctgcccaccagggctgcctgcctccgttcccggcggacgtgttcatgattccccagtacggctacctaacactcaacaacggtagtcaggccgtgggacgctcctccttctactgcctggaatactttccttcgcagatgctgagaaccggcaacaacttccagtttacttacaccttcgaggacgtgcctttccacagcagctacgcccacagccagagcttggaccggctgatgaatcctctgattgaccagtacctgtactacttgtctcggactcaaacaacaggaggcacggcaaatacgcagactctgggcttcagccaaggtgggcctaatacaatggccaatcaggcaaagaactggctgccaggaccctgttaccgccaacaacgcgtctcaacgacaaccgggcaaaacaacaatagcaactttgcctggactgctgggaccaaataccatctgaatggaagaaattcattggctaatcctggcatcgctatggcaacacacaaagacgacaaggagcgtttttttcccagtaacgggatcctgatttttggcaaacaaaatgctgccagagacaatgcggattacagcgatgtcatgctcaccagcgaggaagaaatcaaaaccactaaccctgtggctacagaggaatacggtatcgtggcagataacttgcagcagcaaaacacggctcctcaaattggaactgtcaacagccagggggccttacccggtatggtttggcagaaccgggacgtgtacctgcagggtcccatctgggccaagattcctcacacggacggcaacttccacccgtctccgctgatgggcggctttggcctgaaacatcctccgcctcagatcctgatcaagaacacgcctgtacctgcggatcctccgaccaccttcaaccagtcaaagctgaactctttcatcacacagtactccacgggacaggtcagcgtggaaattgaatgggagctgcagaaggaaaacagcaagcgctggaacccggagatccagtacacttccaactactacaaatctacaaatgtggactttgctgttaacacagaaggcgtgtactctgaaccccaccccattggcacccgttacctcacccgtcccctgtaa

SEQ ID NO: 1093 - DNA, 2211 bp, Artificial Sequence
  source: /note="Description of Artificial Sequence: Synthetic polynucleotide"
  modified_base (715)..(715): a, c, t, or g
atggctgccgatggttatcttccagattggctcgaggacaacctctctgagggcattcgcgagtggtgggacttgaaacctggagccccgaaacccaaagccaaccagcaaaagcaggacgacggccggggtctggtgcttcctggctacaagtacctcggacccttcaacggactcgacaagggggagcccgtcaacgcggcggatgcagcggccctcgagcacgacaaggcctacgaccagcagctccaagcgggtgacaatccgtacctgcggtataaccacgccgacgccgagtttcaggagcgtcttcaaggagatacgtcttttgggggcaacctcggacgagcagtcttccaggccaagaagcgggttctcgaacctctcggtctggttgaggaagcggctaagacggctcctggaaagaagaggcctgtagagcagtctcctcaggaaccggactcctccgcgggtattggcaaatcgggtgcacagcccgctaaaaagagactcaatttcggtcagactggcgacacagagtcagtcccagaccctcaaccaatcggagaacctcccgcagccccctctggtgtgggacctaatacaatggctgcaggcggtggcgcaccaatggcagacaataacgaaggcgccgatggagtgggtagttcctcgggaaattggcattgcgattccacatggctgggcgacagantcatcaccaccagcacccgaacctgggccctgcccacctataacaaccatctctacaagcaaatctccagtgcttcaacgggggccagcaacgacaaccactacttcggctacagcaccccctgggggtattttgacttcaacagattccactgccacttctcaccacgtgactggcagcgactcatcaacaacaactggggattccggcctaagcgactcaacttcaagctcttcaacattcaggtcaaagaggttacggacaacaatggagtcaagaccatcgccaataaccttaccagcacggtccaggtcttcacggactcggagtaccagttgccgtacgtcctcggctctgcgcaccagggctgcctgcctccgttcccggcggacgtgttcatgattccgcagtacggctacctaacgctcaacaatggcagccaggcagtgggacggtcatccttttactgcctggaatatttcccatcgcagatgctgagaacgggcaacaactttaccttcagctacacttttgaggacgttcctttccacagcagctacgctcacagccagagtctggaccgtctcatgaatcctctgattgaccagtacctgtactacttgtctcggactcaaacaacaggaggcacggcaaatacgcagactctgggcttcagccaaggtgggcctaatacaatggccaatcaggcaaagaactggctgccaggaccctgttaccgccaacaacgcgtctcaacgacaaccggacaaaacaacaatagcaactttgcctggactgctgggaccaaataccatctgaatggaagaaattcattggctaatcctggcatcgctatggcaacacacaaagacgacaaggagcgtttttttcccagtaacgggatcctgatttttggcaaacaaaatgctgccagagacaatgcggattacagcgatgtcatgctcaccagcgaggaagaaatcaaaaccactaaccctgtggctacagaggaatacggtatcgtggcagataactttcagcagcaaaacacggctcctcaaattggaactgtcaacagccagggggccttacccggtatggtctggcagaaccgggacgtgtacctgcagggtcccatctgggccaagattcctcacacggacggcaacttccacccgtctccgctgatgggcggctttggcctgaaacatcctccgcctcagatcctgatcaagaacacgcctgtacctgcggatcctccgaccaccttcaaccagtcaaagctgaactctttcatcacgcaatacagcaccggacaggtcagcgtggaaattgaatgggagctgcagaaggaaaacagcaagcgctggaaccccgagatccagtacacctccaactactacaaatctacaagtgtggactttgctgttaatacagaaggcgtgtactctgaaccccaccccattggcacccgttacctcacccgtcccctgtaa

SEQ ID NO: 1094 - DNA, 2211 bp, Artificial Sequence
  source: /note="Description of Artificial Sequence: Synthetic polynucleotide"
atggctgccgatggttatcttccagattggctcgaggacaacctctctgagggcattcgcgagtggtgggcgctgaaacctggagccccgaagcccaaagccaaccagcaaaagcaggacgacggccggggtctggtgcttcctggctacaagtacctcggacccttcaacggactcgacaaaggagagccggtcaacgaggcggacgcggcagccctcgaacacgacaaagcttacgaccagcagctcaaggccggtgacaacccctacctcaagtataaccacgccgacgccgagtttcaggagcgtctgcaagaagatacgtcttttgggggcaacctcgggcgagcagtcttccaggccaaaaagaggcttcttgaacctcttggtctggttgaggaagcggctaagacggctcctggaaagaagaggcctgtagagcagtctcctcaggaaccggactcctccgcgggtattggcaaatcgggtgcacagcccgctaaaaagagactcaatttcggtcagactggcgacacagagtcagtcccagacccacaacctctcggagaacctccagcaacccccgctgctgtgggacctactacaatggcttcaggcggtggcgcaccaatggcggacaataacgaaggcgccgatggagtgggtaatgcctcaggaaattggcattgcgattccacatggctgggcgacagagtcatcaccaccagcacccgaacatgggccttgcccacctataacaaccacctctacaagcaaatctccagtgcttcaacgggggccagcaacgacaaccactacttcggctacagcaccccctgggggtattttgacttcaacagattccactgccacttctcaccacgtgactggcagcgactcatcaacaacaactggggattccggcccaagagactcagcttcaagctcttcaacatccaggtcaaggaggtcacgcagaatgaaggcaccaagaccatcgccaataacctcaccagcaccatccaggtgtttacggactcggagtaccagctgccgtacgttctcggctccgcccaccagggctgcctgcctccgttcccggcggacgtgttcatgattccccagtacggctacctaacactcaacaacggtagtcaggccgtgggacgctcctccttctactgcctggaatactttccttcgcagatgctgagaaccggcaacaacttccagtttacttacaccttcgaggacgtgcctttccacagcagctacgcccacagccagagcttggaccggctgatgaatcctctgattgaccagtacctgtactacttgtctcggactcaaacaacaggaggcacggcaaatacgcagactctgggcttcagccaaggtgggcctaatacaatggccaatcaggcaaagaactggctgccaggaccctgttaccgccaacaacgcgtctcaacgacaaccgggcaaaacaacaatagcaactttgcctggactgctgggaccaaataccatctgaatggaagaaattcattggctaatcctggcatcgctatggcaacacacaaagacgacaaggagcgtttttttcccagtaacgggatcctgatttttggcaaacaaaatgctgccagagacaatgcggattacagcgatgtcatgctcaccagcgaggaagaaatcaaaaccactaaccctgtggctacagaggaatacggtatcgtggcagataacttgcagcagcaaaacacggctcctcaaattggaactgtcaacagccagggggccttacccggtatggtctggcagaaccgggacgtgtacctgcagggtcccatctgggccaagattcctcacacggacggcaacttccacccgtctccgctgatgggcggctttggcctgaaacatcctccgcctcagatcctgatcaagaacacgcctgtacctgcggatcctccgaccaccttcaaccagtcaaagctgaactctttcatcacgcaatacagcaccggacaggtcagcgtggaaattgaatgggagctgcagaaggaaaacagcaagcgctggaaccccgagatccagtacacctccaactactacaaatctacaagtgtggactttgctgttaatacagaaggcgtgtactctgaaccccaccccattggcacccgttacctcacccgtcccctgtaa

SEQ ID NO: 1095 - DNA, 2211 bp, Artificial Sequence
  source: /note="Description of Artificial Sequence: Synthetic polynucleotide"
atggctgccgatggttatcttccagattggctcgaggacactctctctgaaggaataagacagtggtggaagctcaaacctggcccaccaccaccaaagcccgcagagcggcataaggacgacagcaggggtcttgtgcttcctgggtacaagtacctcggacccttcaacggactcgacaagggagagccggtcaacgaggcagacgccgcggccctcgagcacgacaaagcctacgaccagcagctccaagcgggtgacaatccgtacctgcggtataaccacgccgacgccgagtttcaggagcgtcttcaaggagatacgtcttttgggggcaacctcggacgagcagtcttccaggccaaaaagaggcttcttgaacctcttggtctggttgaggaagcggctaagacggctcctggaaagaagaggcctgtagagcagtctcctcaggaaccggactcctccgcgggtattggcaaatcgggtgcacagcccgctaaaaagagactcaatttcggtcagactggcgacacagagtcagtcccagaccctcaaccaatcggagaacctcccgcagccccctcaggtgtgggatctcttacaatggcttcaggtggtggcgcaccagtggcagacaataacgaaggtgccgatggagtgggtagttcctcgggaaattggcattgcgattcccaatggctgggggacagagtcatcaccaccagcacccgaacatgggccttgcccacctataacaaccacctctacaagcaaatctccagtgcttcaacgggggccagcaacgacaaccactacttcggctacagcaccccctgggggtattttgacttcaaccgcttccactgccacttctcaccacgtgactggcagcgactcatcaacaacaactggggattccggcccaagagactcagcttcaagctcttcaacatccaggtcaaggaggtcacgcagaatgaaggcaccaagaccatcgccaataacctcaccagcaccatccaggtgtttacggactcggagtaccagctgccgtacgttctcggctctgcccaccagggctgcctgcctccgttcccggcggacgtgttcatgattccccagtacggctacctaacactcaacaacggtagtcaggccgtgggacgctcctccttctactgcctggaatactttccttcgcagatgctgagaaccggcaacaacttccagtttacttacaccttcgaggacgtgcctttccacagcagctacgcccacagccagagcttggaccggctgatgaatcctctgattgaccagtacctgtactacttgtctcggactcaaacaacaggaggcacggcaaatacgcagactctgggcttcagccaaggtgggcctaatacaatggccaatcaggcaaagaactggctgccaggaccctgttaccgccaacaacgcgtctcaacgacaaccgggcaaaacaacaatagcaactttgcctggactgctgggaccaaataccatctgaatggaagaaattcattggctaatcctggcatcgctatggcaacacacaaagacgacaaggagcgtttttttcccagtaacgggatcctgatttttggcaaacaaaatgctgccagagacaatgcggattacagcgatgtcatgctcaccagcgaggaagaaatcaaaaccactaaccctgtggctacagaggaatacggtatcgtggcagataacttgcagcagcaaaacacggctcctcaaattggaactgtcaacagccagggggccttacccggtatggtctggcagaaccgggacgtgtacctgcagggtcccatctgggccaagattcctcacacggacggcaacttccacccgtctccgctgatgggcggctttggcctgaaacatcctccgcctcagatcctgatcaagaacacgcctgtacctgcggatcctccgaccaccttcaaccagtcaaagctgaactctttcatcacgcaatacagcaccggacaggtcagcgtggaaattgaatgggagctgcagaaggaaaacagcaagcgctggaaccccgagatccagtacacctccaactactacaaatctacaagtgtggactttgctgttaatacagaaggcgtgtactctgaaccccaccccattggcacccgttacctcacccgtcccctgtaa

SEQ ID NO: 1096 - DNA, 2217 bp, Artificial Sequence
  source: /note="Description of Artificial Sequence: Synthetic polynucleotide"
atggctgccgatggttatcttccagattggctcgaggacaacctctctgagggaataagacagtggtggaagctcaaacctggcccaccaccaccaaagcccgcagagcggcataaggacgacagcaggggtcttgtgcttcctgggtacaagtacctcggacccttcaacggactcgacaagggagagccggtcaacgcggcggacgcagcggccctcgagcacgacaaggcctacgaccagcagctcaaagcgggtgacaatccgtacctgcggtataaccacgccgacgccgagtttcaggagcgtctgcaagaagatacgtcttttgggggcaacctcgggcgagcagtcttccaggccaagaagcgggttctcgaacctctcggtctggttgaggaaggcgctaagacggctcctggaaagaagagaccggtagagccatcaccccagcgttctccagactcctctacgggcatcggcaagaaaggccagcagcccgctaaaaagagactcaattttggtcagactggcgactcagagtcagtccccgacccacaacctctcggagaacctccagcaacccccgctgctgtgggacctactacaatggcttcaggcggtggcgcaccaatggcagacaataacgaaggcgccgacggagtgggtaatgcctcaggaaattggcattgcgattccacatggctgggggacagagtcatcaccaccagcacccgaacctgggccctgcccacctacaacaaccacctctacaagcaaatctccaacgggacttcgggaggaagcaccaacgacaacacctacttcggctgcgtcacgccctgggggtattttgactttaacaaattccactgccacttttcaccggatgactggcaacgactcatcaacaacggctggggattccggactaagcgactcaacttcaagctcttcagcatgaaagtcaaaaagggtacggacaacactggaatcaagaccatcgcgaataaccttaccaacacggtccatgtcttcgcggactcggagtaccagttgccgtacgtcctcggctctgcgcaccagggctgcctccctccgttcccggcggacgtgttcatgattccgcagtacggctacctaacgctcaacaatggcagccaggcagtgggacggtcatccttttactgcctggaatatttcccatcgcagatgctgagaacgggcaacaactttaccttcagctacacctttgaggacgttcctttccacagcagctacgctcacagccagagtctggaccgtctcatgaatcctctgattgaccagtacctgtactacttgtctcggactcaaacaacaggaggcacggcaaatacgcagactctgggcttcagccaaggtgggcctaatacaatggccaatcaggcaaagaactggctgccaggaccctgttaccgccaacaacgcgtctcaacgacaaccgggcaaaacaacaatagcaactttgcctggactgctgggaccaaataccatctgaatggaagaaattcattggctaatcctggcatcgctatggcaacacacaaagacgacaaggagcgtttttttcccagtaacgggatcctgatttttggcaaacaaaatgctgccagagacaatgcggattacagcgatgtcatgctcaccagcgaggaagaaatcaaaaccactaaccctgtggctacagaggaatacggtatcgtggcagataacttgcagcagcaaaacacggctcctcaaattggaactgtcaacagccagggggccttacccggtatggtctggcagaaccgggacgtgtacctgcagggtcccatctgggccaagattcctcacacggacggcaacttccacccgtctccgctgatgggcggctttggcctgaaacatcctccgcctcagatcctgatcaagaacacgcctgtacctgcggatcctccgaccaccttcaaccagtcaaagctgaactctttcatcacgcaatacagcaccggacaggtcagcgtggagatcgagtgggagctgcagaaggaaaacagcaagcgctggaacccggagatccagtacacctccaactactacaaatctacaagtgtggactttgctgttaatacagaaggcgtgtactctgaaccccaccccattggcacccgttacctcacccgtcccctgtaa

SEQ ID NO: 1097 - DNA, 2214 bp, Artificial Sequence
  source: /note="Description of Artificial Sequence: Synthetic polynucleotide"
atggctgccgatggttatcttccagattggctcgaggacactctctctgaaggaataagacagtggtggaagctcaaacctggcccaccaccaccaaagcccgcagagcggcataaggacgacagcaggggtcttgtgcttcctgggtacaagtacctcggacccttcaacggactcgacaagggggagcccgtcaacgcggcggacgcagcggccctcgagcacgacaaggcctacgaccagcagctcaaagcgggtgacaatccgtacctgcggtataaccacgccgacgccgagtttcaggagcgtctgcaagaagatacgtcttttgggggcaacctcgggcgagcagtcttccaggccaagaagcgggttctcgaacctctcggtctggttgaggaaggcgctaagacggctcctggaaagaagagaccggtagagccatcaccccagcgttctccagactcctctacgggcatcggcaagaaaggccagcagcccgcgaaaaagagactcaactttgggcagactggcgactcagagtcagtgcccgaccctcaaccaatcggagaaccccccgcaggcccctctggtctgggatctggtacaatggctgcaggcggtggcgctccaatggcagacaataacgaaggcgccgatggagtgggtagttcctcgggaaattggcattgcgattccacatggctgggggacagagtcatcaccaccagcacccgaacctgggccctgcccacctacaacaaccacctctacaaacaaatttccagcgcttcaacgggagcctcgaacgacaatcactactttggctacagcaccccctgggggtattttgacttcaacagattccactgccacttctcaccacgtgactggcagcgactcatcaacaacaactggggattccggcctaagcgactcaacttcaagctcttcaacattcaggtcaaagaggttacggacaacaatggagtcaagaccatcgccaataaccttaccagcacggtccaggtcttcacggactcggagtaccagttgccgtacgtcctcggctctgcgcaccagggctgcctccctccgttcccggcggacgtgttcatgattccgcagtacggctacctaacgctcaacaatggcagccaggcagtgggacggtcatccttttactgcctggaatatttcccatcgcagatgctgagaacgggcaacaactttaccttcagctacacctttgaggacgttcctttccacagcagctacgctcacagccagagtctggaccgtctcatgaatcctctgattgaccagtacctgtactacttgtctcggactcaaacaacaggaggcacggcaaatacgcagactctgggcttcagccaaggtgggcctaatacaatggccaatcaggcaaagaactggctgccaggaccctgttaccgccaacaacgcgtctcaacgacaaccgggcaaaacaacaatagcaactttgcctggactgctgggaccaaataccatctgaatggaagaaattcattggctaatcctggcatcgctatggcaacacacaaagacgacaaggagcgtttttttcccagtaacgggatcctgatttttggcaaacaaaatgctgccagagacaatgcggattacagcgatgtcatgctcaccagcgaggaagaaatcaaaaccactaaccctgtggctacagaggaatacggtatcgtggcagataacctgcagcagcaaaacacggctcctcaaattggaactgtcaacagccagggggccttacccggtatggtctggcagaaccgggacgtgtacctgcagggtcccatctgggccaagattcttcacacggacggcaactttcacccttctccgctgatgggagggtttggaatgaagcacccgcctcctccgatcctgatcaagaacacgcctgtacctgcggatcctccgaccaccttcaaccagtcaaagctgaactctttcatcacgcaatacagcaccggacaggtcagcgtggaaattgaatgggagctgccgaaggaaaacagcaagcgctggaaccccgagatccagtacacctccaactactacaaatctacaagtgtggactttgctgttaatacagaaggtgtgtactatgaaccccaccccattggcacccgttacctcacccctcccctgtaa

SEQ ID NO: 1098 - DNA, 2214 bp, Artificial Sequence
  source: /note="Description of Artificial Sequence: Synthetic polynucleotide"
atggctgccgatggttatcttccagattggctcgaggacaacctctctgagggcattcgcgagtggtgggcgctgaaacctggagccccgaagcccaaagccaaccagcaaaagcaggacgacggccggggtctggtgcttcctggctacaagtacctcggacccttcaacggactcgacaagggggagcccgtcaacgcggcggacgcagcggccctcgagcacgacaaggcctacgaccagcagctcaaagcgggtgacaatccgtacctgcggtataaccacgccgacgccgagtttcaggagcgtctgcaagaagatacgtcttttgggggcaacctcgggcgagcagtcttccaggccaagaagcgggttctcgaacctctcggtctggttgaggaaggcgctaagacggctcctggaaagaagagaccggtagagccatcaccccagcgctctccagactcctctacgggcatcggcaagaaaggccaacagcccgccagaaaaagactcaattttggtcagactggcgactcagagtcagttccagaccctcaacctctcggagaacctccagcagcgccctctggtgtggcacctaatacaatggctgcaggcggtggcgcaccaatggcagacaataacgaaggcgccgacggagtgggtaatgcctcaggaaattggcattgcgattccacatggctgggcgacagagtcatcaccaccagcacccgaacatgggccttgcccacctataacaaccacctctacaagcaaatctccagtgcttcaacgggggccagcaacgacaaccactacttcggctacagcaccccctgggggtattttgatttcaacagattccactgccacttttcaccacgtgactggcagcgactcatcacaacaattgggggattccggcctaagcgactcaacttcaagctcttcaacattcaggtcaaagaggttacggacaacaatggagtcaagaccatcgccaataaccttaccagcacggtccaggtcttcacggactcggagtaccagttgccgtacgtcctcggctctgcgcaccagggctgcctccctccgttcccggcggacgtgttcatgattccgcagtacggctacctaacgctcaacaatggcagccaggcagtgggacggtcatccttttactgcctggaatatttcccatcgcagatgctgagaacgggcaacaactttaccttcagctacacctttgaggacgttcctttccacagcagctacgctcacagccagagtctggaccggctgatgaatcctctgattgaccagtacctgtactacttgtctcggactcaaacaacaggaggcacggcaaatacgcagactctgggcttcagccaaggtgggcctaatacaatggccaatcaggcaaagaactggctgccaggaccctgttaccgccaacaacgcgtctcaacgacaaccgggcaaaacaacaatagcaactttgcctggactgctgggaccaaataccatctgaatggaagaaattcattggctaatcctggcatcgctatggcaacacacaaagacgacaaggagcgtttttttcccagtaacgggatcctgatttttggcaaacaaaatgctgccagagacaatgcggattacagcgatgtcatgctcaccagcgaggaagaaatcaaaaccactaaccctgtggctacagaggaatacggtatcgtggcagataacttgcagcagcaaaacacggctcctcaaattggaactgtcaacagccagggggccttacccggtatggtctggcagaaccgggacgtgtacctgcagggtcccatctgggccaagattcctcacacggacggcaacttccacccgtctccgctgatgggcggctttggcctgaaacatcctccgcctcagatcctgatcaagaacacgcctgtacctgcggatcctccgaccaccttcaaccagtcaaagctgaactctttcatcacgcaatacagcaccggacaggtcagcgtggaaattgaatgggagctgcagaaggaaaacagcaagcgctggaaccccgagatccagtacacctccaactactacaaatctacaagtgtggactttgctgttaatacagaaggcgtgtactctgaaccccaccccattggcacccgttacctcacccgtcccctgtaa

SEQ ID NO: 1099 - DNA, 2211 bp, Artificial Sequence
  source: /note="Description of Artificial Sequence: Synthetic polynucleotide"
atggctgccgatggttatcttccagattggctcgaggacactctctctgaaggaataagacagtggtggaagctcaaacctggcccaccaccaccaaagcccgcagagcggcataaggacgacggccggggtctggtgcttcctggctacaagtacctcggacccttcaacggactcgacaagggggagcccgtcaacgcggcggacgcagcggccctcgagcacgacaaggcctacgaccagcagctcaaagcgggtgacaatccgtacctgcggtataaccacgccgacgccgagtttcaggagcgtctgcaagaagatacgtcttttgggggcaacctcggacgagcagtcttccaggcgaaaaagagggttcttgaacctctgggcctggttgaggaacctgttaagacggctccgggaaaaaagaggccggtagagcagtcgccacaagagccagactcctcctcgggcatcggcaagaaaggccagcagcccgctaaaaagagactcaattttggtcagactggcgactcagagtcagtccccgacccacaacctctcggagaacctccagcaacccccgctgctgtgggacctactacaatggcttcaggcggtggcgcaccaatggcagacaataacgaaggcgccgacggagtgggtaatgcctcaggaaattggcattgcgattccacatggatgggcgacagagtcatcaccaccagcacccgaacatgggccttgcccacctataacaaccacctctacaagcaaatctccagtgcttcaacgggggccagcaacgacaaccactacttcggctacagcaccccctgggggtattttgactttaacagattccactgccacttttcaccacgtgactggcagcgactcatcaacaacaactggggattccggcctaagcgactcaacttcaagctcttcaacattcaggtcaaggaggtcacgcagaatgaaggcaccaagaccatcgccaataacctcaccagcaccatccaggtgtttacggactcggagtaccagctgccgtacgttctcggctccgcccaccagggctgcctgcctccgttcccggcggacgtgttcatgatcccccagtacggctacctaacactcaacaacggtagtcaggccgtgggacgctcctccttctactgcctggaatactttccttcgcagatgctgagaaccggcaacaacttccagtttacttacaccttcgaggacgtgcctttccacagcagctacgcgcacagccagagcttggaccggctgatgaatcctctgattgaccagtacctgtactacttgtctcggactcaaacaacaggaggcacggcaaatacgcagactctgggcttcagccaaggtgggcctaatacaatggccaatcacgcaaagaactggctgccaggaccctgttaccgccaacaacgcgtctcaacgacaaccgggcaaaacaacaatagcaactttgcctggactgctgggaccaaataccatctgaatggaagaaattcattggctaatcctggcatcgctatggcaacacacaaagacgacaaggagcgtttttttcccagtaacgggatcctgatttttggcaaacaaaatgctgccagagacaatgcggattacagcgatgtcatgctcaccagcgaggaagaaatcaaaaccactaaccctgtggctacagaggaatacggtatcgtggcagataacttgcagcagcaaaacacggctcctcaaattggaactgtcaacagccagggggccttacccggtatggtctggcagaaccgggacgtgtacctgcagggtcccatctgggccaagattcctcacacggacggcaacttccacccgtctccgctgatgggcggcttcggcctgaaacatcctccgcctcagatcctgatcaagaacacgcctgtacctgcggatcctccgaccaccttcaaccagtcaaagctgaactctttcatcacgcaatacagcaccggacaggtcagcgtggaaattgaatgggagctgcagaaggaaaacagcaagcgctggaaccccgagatccagtacacctccaactactacaaatctacaagtgtggactttgctgttaatacagaaggcgtgtactctgaaccccaccccattggcacccgttacctcacccgtcccctgtaa

SEQ ID NO: 1100 - DNA, 2214 bp, Artificial Sequence
  source: /note="Description of Artificial Sequence: Synthetic polynucleotide"
atggctgccgatggttatcttccagattggctcgaggacaacctctctcagggcattcgcgagtggtgggacttgaaacctggagccccgaaacccaaagccaaccagcaaaagcaggacgacggccggggtctggtgcttcctggctacaagtacctcggacccttcaacggactcgacaagggggagcccgtcaacgcggcggacgcagcggccctcgagcacgacaaggcctacgaccagcagctcaaagcgggtgacaatccgtacctgcggtataaccacgccgacgccgagtttcaggagcgtctgcaagaagatacgtcttttgggggcaacctcggacgagcagtcttccaggccaagaagcgggttctcgaacctctcggtctggttgaggaaggcgctaagacggctcctggaaagaagagaccggtagagccatcaccccagcgttctccagactcctctacgggcatcggcaagaaaggccaacagcccgccagaaaaagactcaattttggtcagactggcgactcagagtcagttccagaccctcaacctctcggagaacctccagcagcgcccgctgctgtgggacctactacaatggcttcaggcggtggcgcaccaatggcagacaataacgaaggcgccgacggagtgggtagttcctcgggaaattggcattgcgattcccaatggctgggggacagagtcatcaccaccagcacccgaacctgggccctgcccacctacaacaaccacctctacaagcaaatctccagtgcttcaacgggggccagcaacgacaaccactacttcggctacagcaccccctgggggtattttgacttcaacagattccactgccacttttcaccacgtgactggcaaagactcatcaacaacaactggggattccggcccaagagactcagcttcaagctcttcaacatccaggtcaaggaggtcacgcagaatgaaggcaccaagaccatcgccaataacctcaccagcaccatccaggtgtttacggactcggagtaccagctgccgtacgttctcggctctgcccaccagggctgcctgcctccgttcccggcggacgtgttcatgattccccagtacgggtacctgactctgaacaatggcagtcaggccgtgggccgttcctccttctactgcctggagtactttccttctcaaatgctgagaaccggcaacaacttccagtttacttacaccttcgaggacgtgcctttccacagcagctacgcccacagccagagcttggaccggctgatgaatcctctgattgaccagtacctgtactacttgtctcggactcaaacaacaggaggcacgacaaatgcgcagactctgggcttcagccaaggtgggcctaatacaatggccaatcaggcaaagaactggctgccaggaccctgttaccgccaacaacgcgtctcaacgacaaccgggcaaaacaacaatagcaactttgcctggactgctgggaccaaataccatctgaatggaagaaattcattggctaatcctggcatcgctatggcaacacacaaagacgacaaggagcgtttttttcccagtaacgggatcctgatttttggcaaacaaaatgctgccagagacaatgcggattacagcgatgtcatgctcaccagcgaggaagaaatcaaaaccactaaccctgtggctacagaggaatacggtatcgtggcagataacttgcagcagcaaaacacggctcctcaaattggaactgtcaacagccagggggccttacccggtatggtctggcagaaccgggacgtgtacctgcagggtcccatctgggccaagattcctcacacggacggcaacttccacccgtctccgctgatgggcggctttggcctgaaacatcctccgcctcagatcctgatcaagaacacgcctgtacctgcggatcctccgaccaccttcaaccagtcaaagctgaactctttcatcacacagtactccacgggacaggtcagcgtggaaattgaatgggagctgcagaaggaaaacagcaagcgctggaacccggagatccagtacacttccaactactacaaatctacaaatgtggactttgctgttaacacagaaggcgtgtactctgaaccccaccccattggcacccgttacctcacccgtcccctgtaa

SEQ ID NO: 1101 - DNA, 2211 bp, Artificial Sequence
  source: /note="Description of Artificial Sequence: Synthetic polynucleotide"
atggctgccgatggttatcttccagattggctcgaggacaacctctctgagggcattcgcgagtggtgggacttgaaacctggagccccgaaacccaaagccaaccagcaaaagcaggacgacggccggggtctggtgcttcctggctacaagtacctcggacccttcaacggactcgacaagggggagcccgtcaacgcggcggacgcagcggccctcgagcacgacaaggcctacgaccagcagctcaaagcgggtgacaatccgtacctgcggtataaccacgccgacgccgagtttcaggagcgtctgcaagaagatacgtcttttgggggcaacctcgggcgagcagtcttccaggccaagaagagggttctcgaaccttttggtctggttgaggaaggcgctaagacggctcctggaaagaaacgtccggtagagcagtcgccacaagagccagactcctcctcgggcatcggcaagacaggccagcagcccgctaaaaagagactcaatttcggtcagactggcgacacagagtcagtcccagaccctcaaccaatcggagaacctcccgcagccccctcaggtgtgggacctaatacaatggctgcaggcggtggcgcaccaatggcagacaataacgaaggcgccgacggagtgggtagttcctcgggaaattggcattgcgattccacatggatgggtgacagagtcatcaccaccagcacccgaacctgggccctgcccacctacaataaccacctctacaagcaaatctccagtgcttcaacgggggccagcaacgacaaccactacttcggctacagcaccccctgggggtattttgacttcaacagattccactgccacttctcaccacgtgactggcagcgactcatcaacaacaactggggattccggcctaagcgactcaacttcaagctcttcaacattcaggtcaaggaggtcacgcagaatgaaggcaccaagaccatcgccaataacctcaccagcaccatccaggtgtttacggactcggagtaccagctgccgtacgttctcggctctgcccaccagggctgcctgcctccgttcccggcggacgtgttcatgattccccagtacggctacctaacactcaacaacggtagtcaggccgtgggacgctcctccttctactgcctggaatactttccttcgcagatgctgagaaccggcaacaacttccagtttacttacaccttcgaggacgtgcctttccacagcagctacgcccacagccagagcttggaccggctgatgaatcctctgattgaccagtacctgtactacttgtctcggactcaaacaacaggaggcacggcaaatacgcagactctgggcttcagccaaggtgggcctaatacaatggccaatcaggcaaagaactggctgccaggaccctgttaccgccaacaacgcgtctcaacgacaaccgggcaaaacaacaatagcaactttgcctggactgctgggaccaaataccatctgaatggaagaaattcattggctaatcctggcatcgctatggcaacacacaaagacgacaaggagcgtttttttcccagtaacgggatcctgatttttggcaaacaaaatgctgccagagacaatgcggattacagcgatgtcatgctcaccagcgaggaagaaatcaaaaccactaaccctgtggctacagaggaatacggtatcgtggcagataacttgcagcagcaaaacacggctcctcaaattggaactgtcaacagccagggggccttacccggtatggtctggcagaaccgggacgtgtacctgcagggtcccatctgggccaagattcctcacacggacggcaacttccacccgtctccgctgatgggcggctttggcctgaaacatcctccgcctcagatcctgatcaagaacacgcctgtacctgcggatcctccgaccaccttcaaccagtcaaagctgaactctttcatcacacagtactccacgggacaggtcagcgtggaaattgaatgggagctgcagaaggaaaacagcaagcgctggaacccggagatccagtacacttccaactactacaaatctacaaatgtggactttgctgttaacacagaaggcgtgtactctgaaccccaccccattggcacccgttacttcacccgtcccctgtaa

SEQ ID NO: 1102 - DNA, 2211 bp, Artificial Sequence
  source: /note="Description of Artificial Sequence: Synthetic polynucleotide"
atggctgccgatggttatcttccagattggctcgaggacaacctctctgagggcattcgcgagtggtgggacttgaaacctggagccccgaaacccaaagccaaccagcaaaagcaggacgacggccggggtctggtgcttcctggctacaagtacctcggacccttcaacggactcgacaagggggagcccgtcaacgcggcggacgcagcggccctcgagcacgacaaggcctacgaccagcagctcaaagcgggtgacaatccgtacctgcggtataaccacgccgacgccgagtttcaggagcgtctgcaagaagatacgtcttttgggggcaacctcgggcgagcagtcttccaggccaagaagcgggttctcgaacctctcggtctggttgaggaaggcgctaagacggctcctggaaagaaacgtccggtagagcagtcgccacaagagccagactcctcctcgggcatcggcaagacaggccagcagcccgctaaaaaaagactcaattttggtcagactggcgactcagagtcagttccagaccctcaacctctcggagaacctccagcaacccccgctgctgtgggacctactacaatggcttcaggtggtggcgcaccaatggcagacaataacgagggcgccgacggagtgggtaattcctcgggaaattggcattgcgattccacatggatgggcgacagagtcatcaccaccagcacccgaacctgggccctgcccacctacaacaatcacctctacaagcaaatctccagtgcttcaacgggggccagcaacgacaaccactacttcggctacagcaccccctgggggtattttgacttcaacagattccactgccacttctcaccacgtgactggcagcgactcatcaacaacaactggggattccggcctaagcgactcaacttcaagctcttcaacattcaggtcaaagaggttacggacaacaatggagtcaagaccatcgccaataaccttaccagcacggtccaggtcttcacggactcggagtaccagttgccgtacgtcctcggctctgcgcaccagggctgcctccctccgttcccggcggacgtgttcatgattccgcagtacggctacctaacgctcaacaacggtagtcaggccgtgggacgctcctccttctactgcctggaatactttccttcgcagatgctgagaaccggcaacaacttccagtttacttacaccttcgaggacgtgcctttccacagcagctacgcccacagccagagcttggaccggctgatgaatcctctgattgaccagtacctgtactacttgtctcggactcaaacaacaggaggcacggcaaatacgcagactctgggcttcagccaaggtgggcctaatacaatggccaatcaggcaaagaactggctgccaggaccctgttaccgccaacaacgcgtctcgacgacaaccgggcaaaacaacaatagcaactttgcctggactgctgggaccaaataccatctgaatggaagaaattcattggctaatcctggcatcgctatggcaacacacaaagacgacaaggagcgtttttttcccagtaacgggatcctgatttttggcaaacaaaatgctgccagagacaatgcggattacagcgatgtcatgctcaccagcgaggaagaaatcaaaaccactaaccctgtggctacagaggaatacggtatcgtggcagataacttgcagcagcaaaacacggctcctcaaattggaactgtcaacagccagggggccttacccggtatggtttggcagaaccgggacgtgtacctgcagggtcccatctgggccaagattcctcacacggacggcaacttccacccgtctccgctgatgggcggctttggcctgaaacatcctccgcctcagatcctgatcaagaacacgcctgtacctgcggatcctccgaccaccttcaaccagtcaaagctgaactctttcatcacacagtactccacgggacaggtcagcgtggaaattgaatgggagctgcagaaggaaaacagcaagcgctggaacccggagatccagtacacttccaactactacaaatctacaaatgtggactttgctgttaacacagaaggcgtgtactctgaaccccaccccattggcacccgttacctcacccgtcccctgtaa

SEQ ID NO: 1103 - DNA, 2211 bp, Artificial Sequence
  source: /note="Description of Artificial Sequence: Synthetic polynucleotide"
atggctgccgatggttatcttccagattggctcgaggacaacctctctgagggcattcgcgagtggtgggacttgaaacctggagccccgaagcccaaagccaaccagcaaaagcaggacgacggccggggtctggtgcttcctggctacaagtacctcggacccttcaacggactcgacaagggggagcccgtcaacgcggcggacgcagcggccctcgagcacgacaaggcctacgaccagcagctcaaagcgggtgacaatccgtacctgcggtataaccacgccgacgccgagtttcaggagcgtctgcaagaagatacgtcttttgggggcaacctcgggcgagcagtcttccaggccaagaagcgggttctcgaacctctcggtctggttgaggaaggcgctaagacggctcctggaaagaaacgtccggtagagcagtcaccacaagagccagactcctcctcgggcatcggcaagacaggccagcagcccgctaaaaagagactcaattttggtcagactggcgactcagagtcagtccccgacccacaacctctcggagaacctccagcaacccccgctgctgtgggacctactacaatggcttcaggcggtggcgcaccaatggcggacaataacgaaggcgccgatggagtgggtaatgcctcaggaaattggcattgcgattccacatggctgggcgacagagtcatcaccaccagcacccgaacatgggccttgcccacctataacaaccacctctacaagcaaatctccagtgcttcaacgggggccagcaacgacaaccactacttcggctacagcaccccctgggggtattttgactttaacagattccactgccacttctcaccacgtgactggcagcgactcatcaacaacaactggggattccggcccaagagactcaacttcaagctcttcaacatccaggtcaaggaggtcacgcagaatgaaggcaccaagaccatcgccaataacctcaccagcaccatccaggtgtttacggactcggagtaccagctgccgtacgttctcggctctgcccaccagggctgcctgcctccgttcccggcggacgtgttcatgattccccagtacggctacctgactctgaacaatggcagtcaggccgtgggccgttcctccttctactgcctagagtactttccttctcaaatgctgagaacgggcaacaactttgagttcagctaccagtttgaggacgtgccttttcacagcagctacgcgcacagccaaagcctggaccggctgatgaatcctctgattgaccagtacctgtactacttgtctcggactcaaacaacaggaggcacggcaaatacgcagactctgggcttcagccaaggtgggcctaatacaatggccaatcaggcaaagaactggctgccaggaccctgttaccgccaacaacgcgtctcaacgacaaccgggcaaaacaacaatagcaactttgcctggactgctgggaccaaataccatatgaatggaagaaattcattggttaatcctggcatcgctatggcaacacacaaagacgacaaggagcgtttttttcccagtaacgggatcctgatttttggcaaacaaaatgttgccagagacaatgcggattacagcgatgtcatgctcaccagcgaggaagaaatcaaaaccactaaccctgtggctacagaggaatacggtattgtggcagataacttgcagcagcaaaacacggctcctcaaattggaactgtcaacagccagggggccttacccggtatggtctggcagaaccgggacgtgtacctgcagggtcccatctgggccaagattcctcacacggacggcaacttccacccgtcgccgctgatgggcggctttggcctgaaacatcctccgcctcagatcctgatcaagaacacgcctgtacctgcggatcctccgaccaccttcaaccagtcaaagctgaactctttcatcacgcaatacagcaccggacaggtcagcgtggaaattgaatgggagctgcagaaggaaaacagcaagcgctggaaccccgagatccagtacacctccaactactacaaatctacaagtgtggactttgctgttaatacagaaggcgtgtactctgaaccccaccccattggcacccgttacctcacccgtcccctgtaa

SEQ ID NO: 1104 - protein, 736 aa, Artificial Sequence
  source: /note="Description of Artificial Sequence: Synthetic polypeptide"
MAADGYLPDWLEDTLSEGIRQWWKLKPGPPPPKPAERHKDDSRGLVLPGYKYLGPFNGLDKGEPVNEADAAALEHDKAYDRQLDSGDNPYLKYNHADAEFQERLKEDTSFGGNLGRAVFQAKKRVLEPLGLVEEPVKTAPGKKRPVEQSPQEPDSSSGIGKKGQQPAKKRLNFGQTGDSESVPDPQPLGEPPATPAAVGPTTMASGGGAPMADNNEGADGVGNASGNWHCDSTWMGDRVITTSTRTWALPTYNNHLYKQISSASTGASNDNHYFGYSTPWGYFDFNRFHCHFSPRDWQRLINNNWGFRPKRLNFRLFNIQVKEVTDNNGVKTIANNLTSTVQVFTDSEYQLPYVLGSAHQGCLPPFPADVFMIPQYGYLTLNNGSQAVGRSSFYCLEYFPSQMLRTGNNFTFSYTFEEVPFHSSYAHSQSLDRLMNPLIDQYLYYLSRTQTTGGTANTQTLGFSQGGPNTMANQAKNWLPGPCYRQQRVSTTTGQNNNSNFAWTAGTKYHLNGRNSLANPGIAMATHKDDKERFFPSNGILIFGKQNAARDNADYSDVMLTSEEEIKTTNPVATEEYGIVADNLQQQNTAPQIGTVNSQGALPGMVWQNRDVYLQGPIWAKIPHTDGNFHPSPLMGGFGLKHPPPQILIKNTPVPADPPTTFNQSKLNSFITQYSTGQVSVEIEWELQKENSKRWNPEIQYTSNYYKSTSVDFAVNTEGVYSEPHPIGTRYLTRPL

SEQ ID NO: 1105 - protein, 736 aa, Artificial Sequence
  source: /note="Description of Artificial Sequence: Synthetic polypeptide"
MAADGYLPDWLEDNLSEGIREWWDLKPASPKPKANQQKQDDGRGLVLPGYKYLGPFNGLDKGEPVNAADAAALEHDKAYDQQLKAGDNPYLRYNHADAEFQERLQEDTSFGGNLGRAVFQAKKRLLEPLGLVEEAAKTAPGKKRPVEQSPQEPDSSAGIGKSGAQPAKKRLNFGQTGGTESVPDPQPLGEPPAAPSGVGPNTMAAGGGAPMADNNEGADGVGSSSGNWHCDSTWLGDRVITTSTRTWALPTYNNHLYKQISSASTGASNDNHYFGYSTPWGYFDFNRFHCHFSPRDWQRLINNNWGFRPKRLSFKLFNIQVKEVTQNEGTKTIANNLTSTIQVFTDSEYQLPYVLGSAHQGCLPPFPADVFMIPQYGYLTLNNGSQAVGRSSFYCLEYFPSQMLRTGNNFQFTYTFEDVPFHSSYAHSQSLDRLMNPLIDQYLYYLSRTQTTGGTANTQTLGFSQGGPNTMANQAKNWLPGPCYRQQRVSTTTGQNNNSNFAWTAGTKYHLNGRNSLANPGIAMATHKDDKERFFPSNGILIFGKQNAARDNADYSDVMLTSEEEIKTTNPVATEEYGIVADNLQQQNTAPQIGTVNSQGALPGMVWQNRDVYLQGPIWAKIPHTDGNFHPSPLMGGFGLKHPPPQILIKNTPVPADPPTTFNQSKLNSFITQYSTGQVSVEIEWELQKENSKRWNPEIQYTSNYYKSTSVDFAVNTEGVYSEPHPIGTRYLTRPL

SEQ ID NO: 1106 - protein, 736 aa, Artificial Sequence; identical to SEQ ID NO: 1045
  source: /note="Description of Artificial Sequence: Synthetic polypeptide"

SEQ ID NO: 1107 - protein, 736 aa, Artificial Sequence
  source: /note="Description of Artificial Sequence: Synthetic polypeptide"
MAADGYLPDWLEDNLSEGIREWWDLEPGAPKPKANQQKQDDGRGLVLPGYKYLGPFNGLDKGEPVNAADAAALEHDKAYDQQLKAGDNPYLRYNHADAEFQERLQEDTSFGGNLGRAVFQAKKRVLEPLGLVEEGAKTAPGKKRPVEQSPQEPDSSSGIGKTGQQPAKKRLNFGQTGDSESVPDPQPLGEPPATPAAVGPTTMASGGGAPMADNNEGADGVGNASGNWHCDSTWLGDRVITTSTRTWALPTYNNHLYKQISSASTGASNDNHYFGYSTPWGYFDFNRFHCHFSPRDWQRLINNNWGFRPKRLNFKLFNIQVKEVTDNNGVKTIANNLTSTVQVFTDSEYQLPYVLGSAHQGCLPPFPADVFMIPQYGYLTLNNGSQAVGRSSFYCLEYFPSQMLRTGNNFQFTYTFEDVPFHSSYAHSQSLDRLMNPLIDQYLYYLSRTQTTGGTANTQTLGFSQGGPNTMANQAKNWLPGPCYRQQRVSTTTGQNNNSNFAWTAGTKYHLNGRNSLANPGIAMATHKDDKERFFPSNGILIFGKQNAARDNADYSDVMLTSEEEIKTTNPVATEEYGIVADNLQQQNTAPQIGTVNSQGALPGMVWQNRDVYLQGPIWAKIPHTDGNFHPSPLMGGFGLKHPPPQILIKNTPVPADPPTTFNQSKLNSFITQYSTGQVSVEIEWELQKENSKRWNPEIQYTSNYYKSTSVDFAVNTEGVYSEPHPIGTRYLTRPL

SEQ ID NO: 1108 - protein, 736 aa, Artificial Sequence; identical to SEQ ID NO: 1045
  source: /note="Description of Artificial Sequence: Synthetic polypeptide"

SEQ ID NO: 1109 - protein, 736 aa, Artificial Sequence
  source: /note="Description of Artificial Sequence: Synthetic polypeptide"
MAADGYLPDWLEDTLSEGIRQWWKLKPGPPPPKPAERHKDDSRGLVLPGYKYLGPFNGLDKGEPVNEADAAALEHDKAYDRQLDSGDNPYLKYNHADAEFQERLKEDTSFGGNLGRAVFQAKKRVLEPLGLVEEPVKTAPGKKRPVEQSPQEPDSSSGIGKKGQQPAKKRLNFGQTGDSESVPDPQPLGEPPATPAAVGPTTMASGGGAPMADNNEGADGVGNASGNWHCDSTWLGDRVITTSTRTWALPTYNNHLYKQISSASTGASNDNHYFGYSTPWGYFDFNRFHCHFSPRDWQRLINNNWGFRPKRLNFKLFNIQVKEVTDNNGVKTIANNLTSTVQVFTDSDYQLPYVLGSAHQGCLPPFPADVFMIPQYGYLTLNNGSQAVGRSSFYCLEYFPSQMLRTGNNFQFTYTFEDVPFHSSYAHSQSLDRLMNPLIDQYLYYLSRTQTTGGTANTQTLGFSQGGPNTMANQAKNWLPGPCYRQQRVSTTTGQNNNSNFAWTAGTKYHLNGRNSLANPGIAMATHKDDKERFFPSNGILIFGKQNAARDNADYSDVMLTSEEEIKTTNPVATEEYGIVADNLQQQNTAPQIGTVNSQGALPGMVWQNRDVYLQGPIWAKIPHTDGNFHPSPLMGGFGLKHPPPQILIKNTPVPADPPTTFNQSKLNSFITQYSTGQVSVEIEWELQKENSKRWNPEIQYTSNYYKSTSVDFAVNTEGVYSEPHPIGTRYLTRPL

SEQ ID NO: 1110 - protein, 734 aa, Artificial Sequence
  source: /note="Description of Artificial Sequence: Synthetic polypeptide"
MAADGYLPDWLEDTLSEGIRQWWKLKPGPPPPKPAERHKDDSRGLVLPGYKYLGPFNGLDKGEPVNEADAAALEHDKAYDQQLQAGDNPYLRYNHADAEFQERLQGDTSFGGNLGRAVFQAKKRLLEPLGLVEEAAKTAPGKKRPVEQSPQEPDSSAGIGKSGAQPAKKRLNFGQTGDTESVPDPQPIGEPPAAPSGVGSLTMASGGGAPVADNNEGADGVGSSSGNWHCDSQWLGDRVITTSTRTWALPTYNNHLYKQISSASTGASNDNHYFGYSTPWGYFDFNRFHCHFSPRDWQRLINNNWGFRPKRLSFKLFNHPGQGGHAERHQDHRQPHQHIQVFTDSEYQLPYVLGSAHQGCLPPFPADVFMIPQYGYLTLNNGSQAVGRSSFYCLEYFPSQMLRTGNNFQFTYTFEDVPFHSSYAHSQSLDRLMNPLIDQYLYYLSRTQTTGGTANTQTLGFSQGGPNTMANQAKNWLPGPCYRQQRVSTTTGQNNNSNFAWTAGTKYHLNGRNSLGNPGIAMATHKDDKERFFPSNGILIFGKQNAARDNADYSDVMLTSEEEIKTTNPVATEEYGIVADNLQQQNTAPQIGTVNSQGALPGMVWQNRDVYLQGPIWAKIPHTDGNFHPSPLMGGFGLKHPPPQILIKNTPVPADPPTAFNQSKLNSFITQYSTGQVSVEIEWELQKENSKRWNPEIQYTSNYYKSTSVDFAVNTEGVYSEPHPIGTRYLTRPL

SEQ ID NO: 1111 - protein, 737 aa, Artificial Sequence
  source: /note="Description of Artificial Sequence: Synthetic polypeptide"
MAADGYLPDWLEDNLSEGIREWWDLKHGAPKPKANQQKQDDGRGLVLPGYKYLGPFNGLDKGEPVNAADAAALEHDKAYDQQLKAGDNPYLRYNHADAEFQERLQEDTSFGGNLGRAVFQAKKRVLEPFGLVEEGAKTAPGKKRPVEQSPQEPDSSSGIGKTGQQPAKKRLNFGQTGDSESVPDPQPLGEPPATPAAVGPTTMASGGGAPMADNNEGADGVGNASGNWHCDSTWLGDRVITTSTRTWALPTYNNHLYKQISNGTSGGSTNDNTYFGYSTPWGYFDFNRFHCHFSPRDWQRLINNNWGFRPKRLNFKLFNIQVKEVTQNEGTKTIANNLTSTIQVFTDSEYQLPYVLGSAHQGCLPPFPADVFMIPQYGYLTLNNGSQAVGRSSFYCLEYFPSQMLRTGNNFTFSYTFEDVPFHSSYAHSQSLDRLMNPLIDQYLYYLSRTQTTGGTANTQTLGFSQGGPNTMANQAKNWLPGPCYRQQRVSTTTGQNNNSNFAWTAGTKYHLNGRNSLANPGIAMATHKDDKERFFPSNGILIFGKQNAARDNADYSDVMLTSEEEIKTTNPVATEEYGIVADNLQQQNTAPQIGTVNSQGALPGMVWQNRDVYLQGPIWAKIPHTDGNFHPSPLMGGFGLKHPPPQILIKNTPVPADPPTTFNQSKLNSFITQYSTGQVSVEIEWELQKENSKRWNPEIQYTSNYYKSTSVDFAVNTEGVYSDPHPIGTRYLTRPL

SEQ ID NO: 1112 - protein, 737 aa, Artificial Sequence
  source: /note="Description of Artificial Sequence: Synthetic polypeptide"
MAADGYLPDWLEDNLSEGIREWWALKPGAPKPKANQQKQDDGRGLVLPGYKYLGPFNGLDKGEPVNEADAAALEHDKAYDQQLKAGDNPYLRYNHADAEFQERLQEDTSFGGNLGRAVFQAKKRVLEPLGLVEEGAKTAPGKKRPVEPSPQRSPDSSTGIGKKGQQPARKRLNFGQTGDSESVPDPQPLGEPPAAPSGVGPNTMASGGGAPMADNNEGADGVGNSSGNWHCDSTWMGDRVITTSTRTWALPTYNNHLYKQISSASTGASNDNHYFGYSTPWGYFDFNRFHCHFSPRDWQRLINNNWGFRPKRLNFKLFNIQVKEVTQNEGTKTIANNLTSTIQVFTDSEYQLPYVLGSAHQGCLPPFPADVFMIPQYGYLTLNNGSQAVGRSSFYCLEYFPSQMLRTGNNFQFTYTFEDVPFHSSYAHSQSLDRLMNPLIDQYLYYLSRTQTTGGTANTQTLGFSQGGPNTMANQAKNWLPGPCYRQQRVSTTTGQNNNSNFAWTAGTKYHLNGRNSLANPGIAMATHKDDKERFFPSNGILIFGKQNAARDNADYSDVMLTSEEEIKTTNPVATEEYGIVADNLQQQNTAPQIGTVNSQGALPGMVWQNRDVYLQGPIWAKIPHTDGNFHPSPLMGGFGLKHPPPQILIKNTPVPADPPTTFNQSKLNSFITQYSTGQVSVEIEWELQKENSKRWNPEIQYTSNYYKSTSVDFAVNTEGVYSEPHPIGTRYLTRPL

SEQ ID NO: 1113 - protein, 736 aa, Artificial Sequence
  source: /note="Description of Artificial Sequence: Synthetic polypeptide"
  MOD_RES (226)..(226): Any naturally occurring amino acid
MAADGYLPDWLEDTLSEGIRQWWKLKPGPPPPKPAERHKDDSRGLVLPGYKYLGPFNGLDKGEPVNEADAAALEHDKAYDRQLDSGDNPYLKYNHADAEFQERLKEDTSFGGNLGRAVFQAKKRVLEPLGLVEEPVKTAPGKKRPVEQSPQEPDSSSGIGKKGQQPAKKRLNFGQTGDSESVPDPQPLGEPPATPAAVGPTTMASGGGAPMADNNEGADGVGNASXNWHCDSTWLGDRVITTSTRTWALPPITTTSTSKSPVLQRGRSNDNHYFGYSTPWGYFDFNRFHCHFSPRDWQRLINNNWGFRPKRLNFKLFNIQVKEVTDNNGVKTIANNLTSTVQVFTDSDYQLPYVLGSAHQGCLPPFPADVFMIPQYGYLTLNNGSQAVGRSSFYCLEYFPSQMLRTGNNFQFTYTFEDVPFHSSYAHSQSLDRLMNPLIDQYLYYLSRTQTTGGTANTQTLGFSQGGPNTMANQAKNWLPGPCYRQQRVSTTTGQNNNSNFAWTAGTKYHLNGRNSLANPGIAMATHKDDKERFFPSNGILIFGKQNAARDNADYSDVMLTSEEEIKTTNPVATEEYGIVADNLQQQNTAPQIGTVNSQGALPGMVWQNRDVYLQGPIWAKIPHTDGNFHPSPLMGGFGLKHPPPQILIKNTPVPADPPTTFNQSKLNSFITQYSTGQVSVEIEWELQKENSKRWNPEIQYTSNYYKSTNVDFAVNTEGVYSEPHPIGTRYLTRPL

SEQ ID NO: 1114 - protein, 736 aa, Artificial Sequence
  source: /note="Description of Artificial Sequence: Synthetic polypeptide"
  MOD_RES (239)..(239): Any naturally occurring amino acid
MAADGYLPDWLEDNLSEGIREWWDLKPGAPKPKANQQKQDDGRGLVLPGYKYLGPFNGLDKGEPVNAADAAALEHDKAYDQQLQAGDNPYLRYNHADAEFQERLQGDTSFGGNLGRAVFQAKKRVLEPLGLVEEAAKTAPGKKRPVEQSPQEPDSSAGIGKSGAQPAKKRLNFGQTGDTESVPDPQPIGEPPAAPSGVGPNTMAAGGGAPMADNNEGADGVGSSSGNWHCDSTWLGDRXITTSTRTWALPTYNNHLYKQISSASTGASNDNHYFGYSTPWGYFDFNRFHCHFSPRDWQRLINNNWGFRPKRLNFKLFNIQVKEVTDNNGVKTIANNLTSTVQVFTDSEYQLPYVLGSAHQGCLPPFPADVFMIPQYGYLTLNNGSQAVGRSSFYCLEYFPSQMLRTGNNFTFSYTFEDVPFHSSYAHSQSLDRLMNPLIDQYLYYLSRTQTTGGTANTQTLGFSQGGPNTMANQAKNWLPGPCYRQQRVSTTTGQNNNSNFAWTAGTKYHLNGRNSLANPGIAMATHKDDKERFFPSNGILIFGKQNAARDNADYSDVMLTSEEEIKTTNPVATEEYGIVADNFQQQNTAPQIGTVNSQGALPGMVWQNRDVYLQGPIWAKIPHTDGNFHPSPLMGGFGLKHPPPQILIKNTPVPADPPTTFNQSKLNSFITQYSTGQVSVEIEWELQKENSKRWNPEIQYTSNYYKSTSVDFAVNTEGVYSEPHPIGTRYLTRPL

SEQ ID NO: 1115 - protein, 736 aa, Artificial Sequence
  source: /note="Description of Artificial Sequence: Synthetic polypeptide"
MAADGYLPDWLEDNLSEGIREWWALKPGAPKPKANQQKQDDGRGLVLPGYKYLGPFNGLDKGEPVNEADAAALEHDKAYDQQLKAGDNPYLKYNHADAEFQERLQEDTSFGGNLGRAVFQAKKRLLEPLGLVEEAAKTAPGKKRPVEQSPQEPDSSAGIGKSGAQPAKKRLNFGQTGDTESVPDPQPLGEPPATPAAVGPTTMASGGGAPMADNNEGADGVGNASGNWHCDSTWLGDRVITTSTRTWALPTYNNHLYKQISSASTGASNDNHYFGYSTPWGYFDFNRFHCHFSPRDWQRLINNNWGFRPKRLSFKLFNIQVKEVTQNEGTKTIANNLTSTIQVFTDSEYQLPYVLGSAHQGCLPPFPADVFMIPQYGYLTLNNGSQAVGRSSFYCLEYFPSQMLRTGNNFQFTYTFEDVPFHSSYAHSQSLDRLMNPLIDQYLYYLSRTQTTGGTANTQTLGFSQGGPNTMANQAKNWLPGPCYRQQRVSTTTGQNNNSNFAWTAGTKYHLNGRNSLANPGIAMATHKDDKERFFPSNGILIFGKQNAARDNADYSDVMLTSEEEIKTTNPVATEEYGIVADNLQQQNTAPQIGTVNSQGALPGMVWQNRDVYLQGPIWAKIPHTDGNFHPSPLMGGFGLKHPPPQILIKNTPVPADPPTTFNQSKLNSFITQYSTGQVSVEIEWELQKENSKRWNPEIQYTSNYYKSTSVDFAVNTEGVYSEPHPIGTRYLTRPL

SEQ ID NO: 1116 - protein, 736 aa, Artificial Sequence
  source: /note="Description of Artificial Sequence: Synthetic polypeptide"
MAADGYLPDWLEDTLSEGIRQWWKLKPGPPPPKPAERHKDDSRGLVLPGYKYLGPFNGLDKGEPVNEADAAALEHDKAYDQQLQAGDNPYLRYNHADAEFQERLQGDTSFGGNLGRAVFQAKKRLLEPLGLVEEAAKTAPGKKRPVEQSPQEPDSSAGIGKSGAQPAKKRLNFGQTGDTESVPDPQPIGEPPAAPSGVGSLTMASGGGAPVADNNEGADGVGSSSGNWHCDSQWLGDRVITTSTRTWALPTYNNHLYKQISSASTGASNDNHYFGYSTPWGYFDFNRFHCHFSPRDWQRLINNNWGFRPKRLSFKLFNIQVKEVTQNEGTKTIANNLTSTIQVFTDSEYQLPYVLGSAHQGCLPPFPADVFMIPQYGYLTLNNGSQAVGRSSFYCLEYFPSQMLRTGNNFQFTYTFEDVPFHSSYAHSQSLDRLMNPLIDQYLYYLSRTQTTGGTANTQTLGFSQGGPNTMANQAKNWLPGPCYRQQRVSTTTGQNNNSNFAWTAGTKYHLNGRNSLANPGIAMATHKDDKERFFPSNGILIFGKQNAARDNADYSDVMLTSEEEIKTTNPVATEEYGIVADNLQQQNTAPQIGTVNSQGALPGMVWQNRDVYLQGPIWAKIPHTDGNFHPSPLMGGFGLKHPPPQILIKNTPVPADPPTTFNQSKLNSFITQYSTGQVSVEIEWELQKENSKRWNPEIQYTSNYYKSTSVDFAVNTEGVYSEPHPIGTRYLTRPL

SEQ ID NO: 1117 - protein, 738 aa, Artificial Sequence
  source: /note="Description of Artificial Sequence: Synthetic polypeptide"
MAADGYLPDWLEDNLSEGIRQWWKLKPGPPPPKPAERHKDDSRGLVLPGYKYLGPFNGLDKGEPVNAADAAALEHDKAYDQQLKAGDNPYLRYNHADAEFQERLQEDTSFGGNLGRAVFQAKKRVLEPLGLVEEGAKTAPGKKRPVEPSPQRSPDSSTGIGKKGQQPAKKRLNFGQTGDSESVPDPQPLGEPPATPAAVGPTTMASGGGAPMADNNEGADGVGNASGNWHCDSTWLGDRVITTSTRTWALPTYNNHLYKQISNGTSGGSTNDNTYFGCVTPWGYFDFNKFHCHFSPDDWQRLINNGWGFRTKRLNFKLFSMKVKKGTDNTGIKTIANNLTNTVHVFADSEYQLPYVLGSAHQGCLPPFPADVFMIPQYGYLTLNNGSQAVGRSSFYCLEYFPSQMLRTGNNFTFSYTFEDVPFHSSYAHSQSLDRLMNPLIDQYLYYLSRTQTTGGTANTQTLGFSQGGPNTMANQAKNWLPGPCYRQQRVSTTTGQNNNSNFAWTAGTKYHLNGRNSLANPGIAMATHKDDKERFFPSNGILIFGKQNAARDNADYSDVMLTSEEEIKTTNPVATEEYGIVADNLQQQNTAPQIGTVNSQGALPGMVWQNRDVYLQGPIWAKIPHTDGNFHPSPLMGGFGLKHPPPQILIKNTPVPADPPTTFNQSKLNSFITQYSTGQVSVEIEWELQKENSKRWNPEIQYTSNYYKSTSVDFAVNTEGVYSEPHPIGTRYLTRPL

SEQ ID NO: 1118 - protein, 737 aa, Artificial Sequence
  source: /note="Description of Artificial Sequence: Synthetic polypeptide"
MAADGYLPDWLEDTLSEGIRQWWKLKPGPPPPKPAERHKDDSRGLVLPGYKYLGPFNGLDKGEPVNAADAAALEHDKAYDQQLKAGDNPYLRYNHADAEFQERLQEDTSFGGNLGRAVFQAKKRVLEPLGLVEEGAKTAPGKKRPVEPSPQRSPDSSTGIGKKGQQPAKKRLNFGQTGDSESVPDPQPIGEPPAGPSGLGSGTMAAGGGAPMADNNEGADGVGSSSGNWHCDSTWLGDRVITTSTRTWALPTYNNHLYKQISSASTGASNDNHYFGYSTPWGYFDFNRFHCHFSPRDWQRLINNNWGFRPKRLNFKLFNIQVKEVTDNNGVKTIANNLTSTVQVFTDSEYQLPYVLGSAHQGCLPPFPADVFMIPQYGYLTLNNGSQAVGRSSFYCLEYFPSQMLRTGNNFTFSYTFEDVPFHSSYAHSQSLDRLMNPLIDQYLYYLSRTQTTGGTANTQTLGFSQGGPNTMANQAKNWLPGPCYRQQRVSTTTGQNNNSNFAWTAGTKYHLNGRNSLANPGIAMATHKDDKERFFPSNGILIFGKQNAARDNADYSDVMLTSEEEIKTTNPVATEEYGIVADNLQQQNTAPQIGTVNSQGALPGMVWQNRDVYLQGPIWAKILHTDGNFHPSPLMGGFGMKHPPPPILIKNTPVPADPPTTFNQSKLNSFITQYSTGQVSVEIEWELPKENSKRWNPEIQYTSNYYKSTSVDFAVNTEGVYYEPHPIGTRYLTPPL

SEQ ID NO: 1119 - protein, 737 aa, Artificial Sequence
  source: /note="Description of Artificial Sequence: Synthetic polypeptide"
MAADGYLPDWLEDNLSEGIREWWALKPGAPKPKANQQKQDDGRGLVLPGYKYLGPFNGLDKGEPVNAADAAALEHDKAYDQQLKAGDNPYLRYNHADAEFQERLQEDTSFGGNLGRAVFQAKKRVLEPLGLVEEGAKTAPGKKRPVEPSPQRSPDSSTGIGKKGQQPARKRLNFGQTGDSESVPDPQPLGEPPAAPSGVAPNTMAAGGGAPMADNNEGADGVGNASGNWHCDSTWLGDRVITTSTRTWALPTYNNHLYKQISSASTGASNDNHYFGYSTPWGYFDFNRFHCHFSPRDWQRLITTIGGFRPKRLNFKLFNIQVKEVTDNNGVKTIANNLTSTVQVFTDSEYQLPYVLGSAHQGCLPPFPADVFMIPQYGYLTLNNGSQAVGRSSFYCLEYFPSQMLRTGNNFTFSYTFEDVPFHSSYAHSQSLDRLMNPLIDQYLYYLSRTQTTGGTANTQTLGFSQGGPNTMANQAKNWLPGPCYRQQRVSTTTGQNNNSNFAWTAGTKYHLNGRNSLANPGIAMATHKDDKERFFPSNGILIFGKQNAARDNADYSDVMLTSEEEIKTTNPVATEEYGIVADNLQQQNTAPQIGTVNSQGALPGMVWQNRDVYLQGPIWAKIPHTDGNFHPSPLMGGFGLKHPPPQILIKNTPVPADPPTTFNQSKLNSFITQYSTGQVSVEIEWELQKENSKRWNPEIQYTSNYYKSTSVDFAVNTEGVYSEPHPIGTRYLTRPL

SEQ ID NO: 1120 - protein, 736 aa, Artificial Sequence
  source: /note="Description of Artificial Sequence: Synthetic polypeptide"
MAADGYLPDWLEDTLSEGIRQWWKLKPGPPPPKPAERHKDDGRGLVLPGYKYLGPFNGLDKGEPVNAADAAALEHDKAYDQQLKAGDNPYLRYNHADAEFQERLQEDTSFGGNLGRAVFQAKKRVLEPLGLVEEPVKTAPGKKRPVEQSPQEPDSSSGIGKKGQQPAKKRLNFGQTGDSESVPDPQPLGEPPATPAAVGPTTMASGGGAPMADNNEGADGVGNASGNWHCDSTWMGDRVITTSTRTWALPTYNNHLYKQISSASTGASNDNHYFGYSTPWGYFDFNRFHCHFSPRDWQRLINNNWGFRPKRLNFKLFNIQVKEVTQNEGTKTIANNLTSTIQVFTDSEYQLPYVLGSAHQGCLPPFPADVFMIPQYGYLTLNNGSQAVGRSSFYCLEYFPSQMLRTGNNFQFTYTFEDVPFHSSYAHSQSLDRLMNPLIDQYLYYLSRTQTTGGTANTQTLGFSQGGPNTMANHAKNWLPGPCYRQQRVSTTTGQNNNSNFAWTAGTKYHLNGRNSLANPGIAMATHKDDKERFFPSNGILIFGKQNAARDNADYSDVMLTSEEEIKTTNPVATEEYGIVADNLQQQNTAPQIGTVNSQGALPGMVWQNRDVYLQGPIWAKIPHTDGNFHPSPLMGGFGLKHPPPQILIKNTPVPADPPTTFNQSKLNSFITQYSTGQVSVEIEWELQKENSKRWNPEIQYTSNYYKSTSVDFAVNTEGVYSEPHPIGTRYLTRPL

SEQ ID NO: 1121 - protein, 737 aa, Artificial Sequence
  source: /note="Description of Artificial Sequence: Synthetic polypeptide"
MAADGYLPDWLEDNLSQGIREWWDLKPGAPKPKANQQKQDDGRGLVLPGYKYLGPFNGLDKGEPVNAADAAALEHDKAYDQQLKAGDNPYLRYNHADAEFQERLQEDTSFGGNLGRAVFQAKKRVLEPLGLVEEGAKTAPGKKRPVEPSPQRSPDSSTGIGKKGQQPARKRLNFGQTGDSESVPDPQPLGEPPAAPAAVGPTTMASGGGAPMADNNEGADGVGSSSGNWHCDSQWLGDRVITTSTRTWALPTYNNHLYKQISSASTGASNDNHYFGYSTPWGYFDFNRFHCHFSPRDWQRLINNNWGFRPKRLSFKLFNIQVKEVTQNEGTKTIANNLTSTIQVFTDSEYQLPYVLGSAHQGCLPPFPADVFMIPQYGYLTLNNGSQAVGRSSFYCLEYFPSQMLRTGNNFQFTYTFEDVPFHSSYAHSQSLDRLMNPLIDQYLYYLSRTQTTGGTTNAQTLGFSQGGPNTMANQAKNWLPGPCYRQQRVSTTTGQNNNSNFAWTAGTKYHLNGRNSLANPGIAMATHKDDKERFFPSNGILIFGKQNAARDNADYSDVMLTSEEEIKTTNPVATEEYGIVADNLQQQNTAPQIGTVNSQGALPGMVWQNRDVYLQGPIWAKIPHTDGNFHPSPLMGGFGLKHPPPQILIKNTPVPADPPTTFNQSKLNSFITQYSTGQVSVEIEWELQKENSKRWNPEIQYTSNYYKSTNVDFAVNTEGVYSEPHPIGTRYLTRPL

SEQ ID NO: 1122 - protein, 736 aa, Artificial Sequence
  source: /note="Description of Artificial Sequence: Synthetic polypeptide"
MAADGYLPDWLEDNLSEGIREWWDLKPGAPKPKANQQKQDDGRGLVLPGYKYLGPFNGLDKGEPVNAADAAALEHDKAYDQQLKAGDNPYLRYNHADAEFQERLQEDTSFGGNLGRAVFQAKKRVLEPFGLVEEGAKTAPGKKRPVEQSPQEPDSSSGIGKTGQQPAKKRLNFGQTGDTESVPDPQPIGEPPAAPSGVGPNTMAAGGGAPMADNNEGADGVGSSSGNWHCDSTWMGDRVITTSTRTWALPTYNNHLYKQISSASTGASNDNHYFGYSTPWGYFDFNRFHCHFSPRDWQRLINNNWGFRPKRLNFKLFNIQVKEVTQNEGTKTIANNLTSTIQVFTDSEYQLPYVLGSAHQGCLPPFPADVFMIPQYGYLTLNNGSQAVGRSSFYCLEYFPSQMLRTGNNFQFTYTFEDVPFHSSYAHSQSLDRLMNPLIDQYLYYLSRTQTTGGTANTQTLGFSQGGPNTMANQAKNWLPGPCYRQQRVSTTTGQNNNSNFAWTAGTKYHLNGRNSLANPGIAMATHKDDKERFFPSNGILIFGKQNAARDNADYSDVMLTSEEEIKTTNPVATEEYGIVADNLQQQNTAPQIGTVNSQGALPGMVWQNRDVYLQGPIWAKIPHTDGNFHPSPLMGGFGLKHPPPQILIKNTPVPADPPTTFNQSKLNSFITQYSTGQVSVEIEWELQKENSKRWNPEIQYTSNYYKSTNVDFAVNTEGVYSEPHPIGTRYFTRPL

SEQ ID NO: 1123 - protein, 736 aa, Artificial Sequence
  source: /note="Description of Artificial Sequence: Synthetic polypeptide"
MAADGYLPDWLEDNLSEGIREWWDLKPGAPKPKANQQKQDDGRGLVLPGYKYLGPFNGLDKGEPVNAADAAALEHDKAYDQQLKAGDNPYLRYNHADAEFQERLQEDTSFGGNLGRAVFQAKKRVLEPLGLVEEGAKTAPGKKRPVEQSPQEPDSSSGIGKTGQQPAKKRLNFGQTGDSESVPDPQPLGEPPATPAAVGPTTMASGGGAPMADNNEGADGVGNSSGNWHCDSTWMGDRVITTSTRTWALPTYNNHLYKQISSASTGASNDNHYFGYSTPWGYFDFNRFHCHFSPRDWQRLINNNWGFRPKRLNFKLFNIQVKEVTDNNGVKTIANNLTSTVQVFTDSEYQLPYVLGSAHQGCLPPFPADVFMIPQYGYLTLNNGSQAVGRSSFYCLEYFPSQMLRTGNNFQFTYTFEDVPFHSSYAHSQSLDRLMNPLIDQYLYYLSRTQTTGGTANTQTLGFSQGGPNTMANQAKNWLPGPCYRQQRVSTTTGQNNNSNFAWTAGTKYHLNGRNSLANPGIAMATHKDDKERFFPSNGILIFGKQNAARDNADYSDVMLTSEEEIKTTNPVATEEYGIVADNLQQQNTAPQIGTVNSQGALPGMVWQNRDVYLQGPIWAKIPHTDGNFHPSPLMGGFGLKHPPPQILIKNTPVPADPPTTFNQSKLNSFITQYSTGQVSVEIEWELQKENSKRWNPEIQYTSNYYKSTNVDFAVNTEGVYSEPHPIGTRYLTRPL

SEQ ID NO: 1124 - protein, 736 aa, Artificial Sequence
  source: /note="Description of Artificial Sequence: Synthetic polypeptide"
MAADGYLPDWLEDNLSEGIREWWDLKPGAPKPKANQQKQDDGRGLVLPGYKYLGPFNGLDKGEPVNAADAAALEHDKAYDQQLKAGDNPYLRYNHADAEFQERLQEDTSFGGNLGRAVFQAKKRVLEPLGLVEEGAKTAPGKKRPVEQSPQEPDSSSGIGKTGQQPAKKRLNFGQTGDSESVPDPQPLGEPPATPAAVGPTTMASGGGAPMADNNEGADGVGNASGNWHCDSTWLGDRVITTSTRTWALPTYNNHLYKQISSASTGASNDNHYFGYSTPWGYFDFNRFHCHFSPRDWQRLINNNWGFRPKRLNFKLFNIQVKEVTQNEGTKTIANNLTSTIQVFTDSEYQLPYVLGSAHQGCLPPFPADVFMIPQYGYLTLNNGSQAVGRSSFYCLEYFPSQMLRTGNNFEFSYQFEDVPFHSSYAHSQSLDRLMNPLIDQYLYYLSRTQTTGGTANTQTLGFSQGGPNTMANQAKNWLPGPCYRQQRVSTTTGQNNNSNFAWTAGTKYHMNGRNSLVNPGIAMATHKDDKERFFPSNGILIFGKQNVARDNADYSDVMLTSEEEIKTTNPVATEEYGIVADNLQQQNTAPQIGTVNSQGALPGMVWQNRDVYLQGPIWAKIPHTDGNFHPSPLMGGFGLKHPPPQILIKNTPVPADPPTTFNQSKLNSFITQYSTGQVSVEIEWELQKENSKRWNPEIQYTSNYYKSTSVDFAVNTEGVYSEPHPIGTRYLTRPL

SEQ ID NO: 1125 - DNA, 2217 bp, Artificial Sequence
  source: /note="Description of Artificial Sequence: Synthetic polynucleotide"
atggctgccgatggttatcttccagattggctcgaggacaacctctctgagggcattcgcgagtggtgggcgctgaaacctggagccccgaagcccaaagccaaccagcaaaagcaggacgacggccggggtctggtgcttcctggctacaagtacctcggacccttcaacggactcgacaagggggagcccgtcaacgcggcggacgcagcggccctcgagcacgacaaggcctacgaccagcagctgcaggcgggtgacaatccgtacctgcggtataaccacgccgacgccgagtttcaggagcgtctgcaagaagatacgtcttttgggggcaacctcgggcgagcagtcttccaggccaagaagcgggttctcgaacctctcggtctggttgaggaaggcgctaagacggctcctggaaagaagagaccggtagagccatcaccccagcgttctccagactcctctacgggcatcggcaagaaaggccaacagcccgccagaaaaagactcaattttggtcagactggcgactcagagtcagttccagaccctcaacctctcggagaacctccagcagcgccctctggtgtgggacctaatacaatggctgcaggcggtggcgcaccaatggcagacaataacgaaggcgccgacggagtgggtagttcctcgggaaattggcattgcgattccacatggctgggcgacagagtcatcaccaccagcacccgaacctgggccctgcccacctacaacaaccacctctacaagcaaatctccaacgggacatcgggaggagccaccaacgacaacacctacttcggctacagcaccccctgggggtattttgactttaacagattccactgccacttttcaccacgtgactggcagcgactcatcaacaacaactggggattccggcccaagagactcagcttcaagctcttcaacatccaggtcaaggaggtcacgcagaatgaaggcaccaagaccatcgccaataacctcaccagcaccatccaggtgtttacggactcggagtaccagctgccgtacgttctcggctctgcccaccagggctgcctgcctccgttcccggcggacgtgttcatgattccccagtacggctacctaacactcaacaacggtagtcaggccgtgggacgctcctccttctactgcctggaatactttccttcgcagatgctgagaaccggcaacaacttccagtttacttacaccttcgaggacgtgcctttccacagcagctacgcccacagccagagcttggaccggctgatgaatcctctgattgaccagtacctgtactacttgtctcggactcaaacaacaggaggcacggcaaatacgcagactctgggcttcagccaaggtgggcctaatacaatggccaatcaggcaaagaactggctgccaggaccctgttaccgccaacaacgcgtctcaacgacaaccgggcaaaacaacaatagcaactttgcctggactgctgggaccaaataccatctgaatggaagaaattcattggctaatcctggcatcgctatggcaacacacaaagacgacgaggagcgtttttttcccagtaacgggatcctgatttttggcaaacaaaatgctgccagagacaatgcggattacagcgatgtcatgctcaccagcgaggaagaaatcaaaaccactaaccctgtggctacagaggaatacggtatcgtggcagataacttgcagcagcaaaacacggctcctcaaattggaactgtcaacagccagggggccttacccggtatggtttggcagaaccgggacgtgtacctgcagggtcccatctgggccaagattcctcacacggacggcaacttccacccgtctccgctgatgggcggctttggcctgaaacatcctccgcctcagatcctgatcaagaacacgcctgtacctgcggatcctccgaccaccttcaaccagtcaaagctgaactctttcatcacgcaatacagcaccggacaggtcagcgtggaaattgaatgggagctgcagaaggaaaacagcaagcgctggaaccccgagatccagtacacctccaactactacaaatctacaagtgtggactttgctgttaatacagaaggcgtgtactctgaaccccgccccattggcacccgttacctcacccgtaatctgtaa

SEQ ID NO: 1126 - protein, 738 aa, Artificial Sequence; identical to SEQ ID NO: 116
  source: /note="Description of Artificial Sequence: Synthetic polypeptide"

SEQ ID NO: 1127 - protein, 735 aa, Artificial Sequence
  source: /note="Description of Artificial Sequence: Synthetic polypeptide"
MAADGYLPDWLEDNLSEGVREWWALQPGAPKPKANQQHQDNARGLVLPGYKYLGPGNGLDKGEPVNAADAAALEHDKAYDQQLKAGDNPYLKYNHADAEFQQRLQGDTSFGGNLGRAVFQAKKRVLEPLGLVEQAGETAPGKKRPLIESPQQPDSSTGIGKKGKQPAKKKLVFEDETGAGDGPPEGSTSGAMSDDSEMRAAAGGAAVEGGQGADGVGNASGDWHCDSTWSEGHVTTTSTRTWVLPTYNNHLYKRLGESLQSNTYNGFSTPWGYFDFNRFHCHFSPRDWQRLINNNWGMRPKAMRVKIFNIQVKEVTTSNGETTVANNLTSTVQIFADSSYELPYVMDAGQEGSLPPFPNDVFMVPQYGYCGLVTGNTSQQQTDRNAFYCLEYFPSQMLRTGNNFEITYSFEKVPFHSMYAHSQSLDRLMNPLIDQYLWGLQSTTTGTTLNAGTATTNFTKLRPTNFSNFKKNWLPGPSIKQQGFSKTANQNYKIPATGSDSLIKYETHSTLDGRWSALTPGPPMATAGPADSKFSNSQLIFAGPKQNGNTATVPGTLIFTSEEELAATNATDTDMWGNLPGGDQSNSNLPTVDRLTALGAVPGMVWQNRDIYYQGPIWAKIPHTDGHFHPSPLIGGFGLKHPPPQIFIKNTPVPANPATTFSSTPVNSFITQYSTGQVSVQIDWEIQKERSKRWNPEVQFTSNYGQQNSLLWAPDAAGKYTEPRAIGTRYLTHHL

SEQ ID NO: 1128 - protein, 735 aa, Artificial Sequence
  source: /note="Description of Artificial Sequence: Synthetic polypeptide"
MAADGYLPDWLEDNLSEGVREWWALQPGAPKPKANQQHQDNARGLVLPGYKYLGPGNGLDKGEPVNAADAAALEHDKAYDQQLKAGDNPYLKYNHADAEFQQRLQGDTSFGGNLGRAVFQAKKRVLEPLGLVEQAGETAPGKKRPLIESPQQPDSSTGIGKKGKQPAKKKLVFEDETGAGDGPPEGSTSGAMSDDSEMRAAAGGAAVEGGQGADGVGNASGDWHCDSTWSEGHVTTTSTRTWVLPTYNNHLYKRLGESLQSNTYNGFSTPWGYFDFNRFHCHFSPRDWQRLINNNWGMRPKAMRVKIFNIQVKEVTTSNGETTVANNLTSTVQIFADSSYELPYVMDAGQEGSLPPFPNDVFMVPQYGYCGLVTGNTSQQQTDRNAFYCLEYFPSQMLRTGNNFEITYSFEKVPFHSMYAHSQSLDRLMNPLIDQYLWGLQSTTTGTTLNAGTATTNFTKLRPTNFSNFKKNWLPGPSIKQQGFSKTANQNYLIPATGSDSLIRYETHSTLDGRWSALTPGPPMATAGPADSKFSNSQLIFAGPKQNGNTATVPGTLIFTSEEELAATNATDTDMWGNLPFRDLSSSNLPTVDRSTPLGAVPGMVWQNRDIYYQGPIWAKIPHTDGHFHPSPLIGGFGLKHPPPQIFIKNTPVPANPATTFSSTPVNSFITQYSTGQVSVQIDWEIQKERSKRWNPEVQFTSNYGQQNSLLWAPDAAGKYTEPRAIGTRYLTHHL

SEQ ID NO: 1129 - protein, 735 aa, Artificial Sequence
  source: /note="Description of Artificial Sequence: Synthetic polypeptide"
MAADGYLPDWLEDNLSEGVREWWALQPGAPKPKANQQHQDNARGLVLPGYKYLGPGNGLDKGEPVNAADAAALEHDKAYDQQLKAGDNPYLKYNHADAEFQQRLQGDTSFGGNLGRAVFQAKKRVLEPLGLVEQAGETAPGKKRPLIESPQQPDSSTGIGKKGKQPAKKKLVFEDETGAGDGPPEGSTSGAMSDDSEMRAAAGGAAVEGGQGADGVGNASGDWHCDSTWSEGHVTTTSTRTWVLPTYNNHLYKRLGESLQSNTYNGFSTPWGYFDFNRFHCHFSPRDWQRLINNNWGMRPKAMRVKIFNIQVKEVTTSNGETTVANNLTSTVQIFADSSYELPYVMDAGQEGSLPPFPNDVFMVPQYGYCGLVTGNTSQQQTDRNAFYCLEYFPSQMLRTGNNFEITYSFEKVPFHSMYAHSQSLDRLMNPLIDQYLWGLQSTTTGTTLNAGTATTNFTKLRPTNFSNFKKNWLPGPSIKQQGFSKTANQNYYIPATGSDSLILYETHSTLDGRWSALTPGPPMATAGPADSKFSNSQLIFAGPKQNGNTATVPGTLIFTSEEELAATNATDTDMWGNLPGGDQSNSNLPTVDRLTALGAVPGMVWQNRDIYYQGPIWAKIPHTDGHFHPSPLIGGFGLKHPPPQIFIKNTPVPANPATTFSSTPVNSFITQYSTGQVSVQIDWEIQKERSKRWNPEVQFTSNYGQQNSLLWAPDAAGKYTEPRAIGTRYLTHHL

SEQ ID NO: 1130 - protein, 735 aa, Artificial Sequence
  source: /note="Description of Artificial Sequence: Synthetic polypeptide"
MAADGYLPDWLEDNLSEGVREWWALQPGAPKPKANQQHQDNARGLVLPGYKYLGPGNGLDKGEPVNAADAAALEHDKAYDQQLKAGDNPYLKYNHADAEFQQRLQGDTSFGGNLGRAVFQAKKRVLEPLGLVEQAGETAPGKKRPLIESPQQPDSSTGIGKKGKQPAKKKLVFEDETGAGDGPPEGSTSGAMSDDSEMRAAAGGAAVEGGQGADGVGNASGDWHCDSTWSEGHVTTTSTRTWVLPTYNNHLYKRLGESLQSNTYNGFSTPWGYFDFNRFHCHFSPRDWQRLINNNWGMRPKAMRVKIFNIQVKEVTTSNGETTVANNLTSTVQIFADSSYELPYVMDAGQEGSLPPFPNDVFMVPQYGYCGLVTGNTSQQQTDRNAFYCLEYFPSQMLRTGNNFEITYSFEKVPFHSMYAHSQSLDRLMNPLIDQYLWGLQSTTTGTTLNAGTATTNFTKLRPTNFSNFKKNWLPGPSIKQQGFSKTANQNYGIPATGSDSLIKYETHSTLDGRWSALTPGPPIATAGPADSKFSNSQLIFAGPKQNGNTATVPGTLIFTSEEELAATNATDTDMWGNLPLYDASSSNLPTVDRLTLLGAVPGMVWQNRDIYYQGPIWAKIPHTDGHFHPSPLIGGFGLKHPPPQIFIKNTPVPANPATTFSSTPVNSFITQYSTGQVSVQIDWEIQKERSKRWNPEVQFTSNYGQQNSLLWAPDAAGKYTEPRAIGTRYLTHHL

SEQ ID NO: 1131 - protein, 735 aa, Artificial Sequence
  source: /note="Description of Artificial Sequence: Synthetic polypeptide"
MAADGYLPDWLEDNLSEGVREWWALQPGAPKPKANQQHQDNARGLVLPGYKYLGPGNGLDKGEPVNAADAAALEHDKAYDQQLKAGDNPYLKYNHADAEFQQRLQGDTSFGGNLGRAVFQAKKRVLEPLGLVEQAGETAPGKKRPLIESPQQPDSSTGIGKKGKQPAKKKLVFEDETGAGDGPPEGSTSGAMSDDSEMRAAAGGAAVEGGQGADGVGNASGDWHCDSTWSEGHVTTTSTRTWVLPTYNNHLYKRLGESLQSNTYNGFSTPWGYFDFNRFHCHFSPRDWQRLINNNWGMRPKAMRVKIFNIQVKEVTTSNGETTVANNLTSTVQIFADSSYELPYVMDAGQEGSLPPFPNDVFMVPQYGYCGLVTGNTSQQQTDRNAFYCLEYFPSQMLRTGNNFEITYSFEKVPFHSMYAHSQSLDRLMNPLIDQYLWGLQSTTTGTTLNAGTATTNFTKLRPTNFSNFKKNWLPGPSIKQQGFSKTANQNYTIPATGSDSLITYETHSTLDGRWSALTPGPPGATAGPADSKFSNSQLIFAGPKQNGNTATVPGTLIFTSEEELAATNATDTDMWGNLPRVDTSASNLPTVDRYTNLGAVPGMVWQNRDIYYQGPIWAKIPHTDGHFHPSPLIGGFGLKHPPPQIFIKNTPVPANPATTFSSTPVNSFITQYSTGQVSVQIDWEIQKERSKRWNPEVQFTSNYGQQNSLLWAPDAAGKYTEPRAIGTRYLTHHL

SEQ ID NO: 1132 - protein, 735 aa, Artificial Sequence
  source: /note="Description of Artificial Sequence: Synthetic polypeptide"
MAADGYLPDWLEDNLSEGVREWWALQPGAPKPKANQQHQDNARGLVLPGYKYLGPGNGLDKGEPVNAADAAALEHDKAYDQQLKAGDNPYLKYNHADAEFQQRLQGDTSFGGNLGRAVFQAKKRVLEPLGLVEQAGETAPGKKRPLIESPQQPDSSTGIGKKGKQPAKKKLVFEDETGAGDGPPEGSTSGAMSDDSEMRAAAGGAAVEGGQGADGVGNASGDWHCDSTWSEGHVTTTSTRTWVLPTYNNHLYKRLGESLQSNTYNGFSTPWGYFDFNRFHCHFSPRDWQRLINNNWGMRPKAMRVKIFNIQVKEVTTSNGETTVANNLTSTVQIFADSSYELPYVMDAGQEGSLPPFPNDVFMVPQYGYCGLVTGNTSQQQTDRNAFYCLEYFPSQMLRTGNNFEITYSFEKVPFHSMYAHSQSLDRLMNPLIDQYLWGLQSTTTGTTLNAGTATTNFTKLRPTNFSNFKKNWLPGPSIKQQGFSKTANQNYSIPATGSDSLIKYETHSTLDGRWSALTPGPPFATAGPADSKFSNSQLIFAGPKQNGNTATVPGTLIFTSEEELAATNATDTDMWGNLPDYDSSLSNLPTVDRDTTLGAVPGMVWQNRDIYYQGPIWAKIPHTDGHFHPSPLIGGFGLKHPPPQIFIKNTPVPANPATTFSSTPVNSFITQYSTGQVSVQIDWEIQKERSKRWNPEVQFTSNYGQQNSLLWAPDAAGKYTEPRAIGTRYLTHHL

SEQ ID NO: 1133 - protein, 735 aa, Artificial Sequence
  source: /note="Description of Artificial Sequence: Synthetic polypeptide"
MAADGYLPDWLEDNLSEGVREWWALQPGAPKPKANQQHQDNARGLVLPGYKYLGPGNGLDKGEPVNAADAAALEHDKAYDQQLKAGDNPYLKYNHADAEFQQRLQGDTSFGGNLGRAVFQAKKRVLEPLGLVEQAGETAPGKKRPLIESPQQPDSSTGIGKKGKQPAKKKLVFEDETGAGDGPPEGSTSGAMSDDSEMRAAAGGAAVEGGQGADGVGNASGDWHCDSTWSEGHVTTTSTRTWVLPTYNNHLYKRLGESLQSNTYNGFSTPWGYFDFNRFHCHFSPRDWQRLINNNWGMRPKAMRVKIFNIQVKEVTTSNGETTVANNLTSTVQIFADSSYELPYVMDAGQEGSLPPFPNDVFMVPQYGYCGLVTGNTSQQQTDRNAFYCLEYFPSQMLRTGNNFEITYSFEKVPFHSMYAHSQSLDRLMNPLIDQYLWGLQSTTTGTTLNAGTATTNFTKLRPTNFSNFKKNWLPGPSIKQQGFSKTANQNYSIPATGSDSLIWYETHSTLDGRWSALTPGPPCATAGPADSKFSNSQLIFAGPKQNGNTATVPGTLIFTSEEELAATNATDTDMWGNLPQGDSSLSNLPTVDRMTVLGAVPGMVWQNRDIYYQGPIWAKIPHTDGHFHPSPLIGGFGLKHPPPQIFIKNTPVPANPATTFSSTPVNSFITQYSTGQVSVQIDWEIQKERSKRWNPEVQFTSNYGQQNSLLWAPDAAGKYTEPRAIGTRYLTHHL

SEQ ID NO: 1134 - protein, 735 aa, Artificial Sequence
  source: /note="Description of Artificial Sequence: Synthetic polypeptide"
MAADGYLPDWLEDNLSEGVREWWALQPGAPKPKANQQHQDNARGLVLPGYKYLGPGNGLDKGEPVNAADAAALEHDKAYDQQLKAGDNPYLKYNHADAEFQQRLQGDTSFGGNLGRAVFQAKKRVLEPLGLVEQAGETAPGKKRPLIESPQQPDSSTGIGKKGKQPAKKKLVFEDETGAGDGPPEGSTSGAMSDDSEMRAAAGGAAVEGGQGADGVGNASGDWHCDSTWSEGHVTTTSTRTWVLPTYNNHLYKRLGESLQSNTYNGFSTPWGYFDFNRFHCHFSPRDWQRLINNNWGMRPKAMRVKIFNIQVKEVTTSNGETTVANNLTSTVQIFADSSYELPYVMDAGQEGSLPPFPNDVFMVPQYGYCGLVTGNTSQQQTDRNAFYCLEYFPSQMLRTGNNFEITYSFEKVPFHSMYAHSQSLDRLMNPLIDQYLWGLQSTTTGTTLNAGTATTNFTKLRPTNFSNFKKNWLPGPSIKQQGFSKTANQNYCIPATGSDSLIRYETHSTLDGRWSALTPGPPLATAGPADSKFSNSQLIFAGPKQNGNTATVPGTLIFTSEEELAATNATDTDMWGNLPYKDSSRSNLPTVDRETSLGAVPGMVWQNRDIYYQGPIWAKIPHTDGHFHPSPLIGGFGLKHPPPQIFIKNTPVPANPATTFSSTPVNSFITQYSTGQVSVQIDWEIQKERSKRWNPEVQFTSNYGQQNSLLWAPDAAGKYTEPRAIGTRYLTHHL

SEQ ID NO: 1135 - protein, 735 aa, Artificial Sequence
  source: /note="Description of Artificial Sequence: Synthetic polypeptide"
MAADGYLPDWLEDNLSEGVREWWALQPGAPKPKANQQHQDNARGLVLPGYKYLGPGNGLDKGEPVNAADAAALEHDKAYDQQLKAGDNPYLKYNHADAEFQQRLQGDTSFGGNLGRAVFQAKKRVLEPLGLVEQAGETAPGKKRPLIESPQQPDSSTGIGKKGKQPAKKKLVFEDETGAGDGPPEGSTSGAMSDDSEMRAAAGGAAVEGGQGADGVGNASGDWHCDSTWSEGHVTTTSTRTWVLPTYNNHLYKRLGESLQSNTYNGFSTPWGYFDFNRFHCHFSPRDWQRLINNNWGMRPKAMRVKIFNIQVKEVTTSNGETTVANNLTSTVQIFADSSYELPYVMDAGQEGSLPPFPNDVFMVPQYGYCGLVTGNTSQQQTDRNAFYCLEYFPSQMLRTGNNFEITYSFEKVPFHSMYAHSQSLDRLMNPLIDQYLWGLQSTTTGTTLNAGTATTNFTKLRPTNFSNFKKNWLPGPSIKQQGFSKTANQNYIIPATGSDSLIYYETHSTLDGRWSALTPGPPRATAGPADSKFSNSQLIFAGPKQNGNTATVPGTLIFTSEEELAATNATDTDMWGNLPWIDNSRSNLPTVDRPTSLGAVPGMVWQNKNIYYQGPIWAKIPHTDGHFHPSPLIGGFGLKHPPPQIFIKNTPVPANPATTFTSTPVNSFITQYSTGQVSVQIDWEIQKERSKRWNPEVQFTSNYGQQNSLLWAPDAAGKYTEPRAIGTRYLTHHL

SEQ ID NO: 1136 - protein, 735 aa, Artificial Sequence
  source: /note="Description of Artificial Sequence: Synthetic polypeptide"
MAADGYLPDWLEDNLSEGVREWWALQPGAPKPKANQQHQDNARGLVLPGYKYLGPGNGLDKGEPVNAADAAALEHDKAYDQQLKAGDNPYLKYNHADAEFQQRLQGDTSFGGNLGRAVFQAKKRVLEPLGLVEQAGETAPGKKRPLIESPQQPDSSTGIGKKGKQPAKKKLVFEDETGAGDGPPEGSTSGAMSDDSEMRAAAGGAAVEGGQGADGVGNASGDWHCDSTWSEGHVTTTSTRTWVLPTYNNHLYKRLGESLQSNTYNGFSTPWGYFDFNRFHCHFSPRDWQRLINNNWGMRPKAMRVKIFNIQVKEVTTSNGETTVANNLTSTVQIFADSSYELPYVMDAGQEGSLPPFPNDVFMVPQYGYCGLVTGNTSQQQTDRNAFYCLEYFPSQMLRTGNNFEITYSFEKVPFHSMYAHSQSLDRLMNPLIDQYLWGLQSTTTGTTLNAGTATTNFTKLRPTNFSNFKKNWLPGPSIKQQGFSKTANQNYGIPATGSDSLIIYETHSTLDGRWSALTPGPPRATAGPADSKFSNSQLIFAGPKQNGNTATVPGTLIFTSEEELAATNATDTDMWGNLPGGDQSNSNLPTVDRLTALGAVPGMVWQNRDIYYQGPIWAKIPHTDGHFHPSPLIGGFGLKHPPPQIFIKNTPVPANPATTFSSTPVNSFITQYSTGQVSVQIDWEIQKERSKRWNPEVQFTSNYGQQNSLLWAPDAAGKYTEPRAIGTRYLTHHL

SEQ ID NO: 1137 - protein, 735 aa, Artificial Sequence
  source: /note="Description of Artificial Sequence: Synthetic polypeptide"
MAADGYLPDWLEDNLSEGVREWWALQPGAPKPKANQQHQDNARGLVLPGYKYLGPGNGLDKGEPVNAADAAALEHDKAYDQQLKAGDNPYLKYNHADAEFQQRLQGDTSFGGNLGRAVFQAKKRVLEPLGLVEQAGETAPGKKRPLIESPQQPDSSTGIGKKGKQPAKKKLVFEDETGAGDGPPEGSTSGAMSDDSEMRAAAGGAAVEGGQGADGVGNASGDWHCDSTWSEGHVTTTSTRTWVLPTYNNHLYKRLGESLQSNTYNGFSTPWGYFDFNRFHCHFSPRDWQRLINNNWGMRPKAMRVKIFNIQVKEVTTSNGETTVANNLTSTVQIFADSSYELPYVMDAGQEGSLPPFPNDVFMVPQYGYCGLVTGNTSQQQTDRNAFYCLEYFPSQMLRTGNNFEITYSFEKVPFHSMYAHSQSLDRLMNPLIDQYLWGLQSTTTGTTLNAGTATTNFTKLRPTNFSNFKKNWLPGPSIKQQGFSKTANQNYVIPATESDSLIYYETHSTLDGRWSALTPGPPYATAGPADSKFSNSQLIFAGPKQNGNTATVPGTLIFTSEEELAATNATDTDMWGNLPPRDDSTSNLPTVDRKTYLGAVPGMVWQNRDIYYQGPIWAKIPHTDGHFHPSPLIGGFGLKHPPPQIFIKNTPVPANPATTFSSTPVNSFITQYSTGQVSVQIDWEIQKERSKRWNPEVQFTSNYGQQNSLLWAPDAAGKYTEPRAIGTRYLTHHL

SEQ ID NO: 1138 - protein, 735 aa, Artificial Sequence
  source: /note="Description of Artificial Sequence: Synthetic polypeptide"
MAADGYLPDWLEDNLSEGVREWWALQPGAPKPKANQQHQDNARGLVLPGYKYLGPGNGLDKGEPVNAADAAALEHDKAYDQQLKAGDNPYLKYNHADAEFQQRLQGDTSFGGNLGRAVFQAKKRVLEPLGLVEQAGETAPGKKRPLIESPQQPDSSTGIGKKGKQPAKKKLVFEDETGAGDGPPEGSTSGAMSDDSEMRAAAGGAAVEGGQGADGVGNASGDWHCDSTWSEGHVTTTSTRTWVLPTYNNHLYKRLGESLQSNTYNGFSTPWGYFDFNRFHCHFSPRDWQRLINNNWGMRPKAMRVKIFNIQVKEVTTSNGETTVANNLTSTVQIFADSSYELPYVMDAGQEGSLPPFPNDVFMVPQYGYCGLVTGNTSQQQTDRNAFYCLEYFPSQMLRTGNNFEITYSFEKVPFHSMYAHSQSLDRLMNPLIDQYLWGLQSTTTGTTLNAGTATTNFTKLRPTNFSNFKKNWLPGPSIKQQGFSKTANQNYYIPATGSDSLIIYETHSTLDGRWSALTPGPPIATAGPADSKFSNSQLIFAGPKQNGNTATVPGTLIFTSEEELAATNSTDTDMWGNLPTDDDSRSNLPTVDRMTLLGAVPGMVWQNRDIYYQGPIWAKIPHTDGHFHPSPLIGGFGLKHPPPQIFIKNTPVPANPATTFSSTPVNSFITQYSTGQVSVQIDWEIQKERSKRWNPEVQFTSNYGQQNSLLWAPDAAGKYTEPRAIGTRYLTHHL

SEQ ID NO: 1139 - protein, 735 aa, Artificial Sequence
  source: /note="Description of Artificial Sequence: Synthetic polypeptide"
MAADGYLPDWLEDNLSEGVREWWALQPGAPKPKANQQHQDNARGLVLPGYKYLGPGNGLDKGEPVNAADAAALEHDKAYDQQLKAGDNPYLKYNHADAEFQQRLQGDTSFGGNLGRAVFQAKKRVLEPLGLVEQAGETAPGKKRPLIESPQQPDSSTGIGKKGKQPAKKKLVFEDETGAGDGPPEGSTSGAMSDDSEMRAAAGGAAVEGGQGADGVGNASGDWHCDSTWSEGHVTTTSTRTWVLPTYNNHLYKRLGESLQSNTYNGFSTPWGYFDFNRFHCHFSPRDWQRLINNNWGMRPKAMRVKIFNIQVKEVTTSNGETTVANNLTSTVQIFADSSYELPYVMDAGQEGSLPPFPNDVFMVPQYGYCGLVTGNTSQQQTDRNAFYCLEYFPSQMLRTGNNFEITYSFEKVPFHSMYAHSQSLDRLMNPLIDQYLWGLQSTTTGTTLNAGTATTNFTKLRPTNFSNFKKNWLPGPSIKQQGFSKTANQNYHIPATGSDSLIYYETHSTLDGRWSALTPGPPSATAGPADSKFSNSQLIFAGPKQNGNTATVPGTLIFTSEEELAATNATDTDMWGNLPRRDSSVSNLPTVDRYTDLGAVPGMVWQNRDIYYQGPIWAKIPHTDGHFHPSPLIGGFGLKHPPPQIFIKNTPVPANPATTFSSTPVNSFITQYSTGQVSVQIDWEIQKERSKRWNPEVQFTSNYGQQNSLLWAPDAAGKYTEPRAIGTRYLTHHL

SEQ ID NO: 1140 - protein, 735 aa, Artificial Sequence
  source: /note="Description of Artificial Sequence: Synthetic polypeptide"
MAADGYLPDWLEDNLSEGVREWWALQPGAPKPKANQQHQDNARGLVLPGYKYLGPGNGLDKGEPVNAADAAALEHDKAYDQQLKAGDNPYLKYNHADAEFQQRLQGDTSFGGNLGRAVFQAKKRVLEPLGLVEQAGETAPGKKRPLIESPQQPDSSTGIGKKGKQPAKKKLVFEDETGAGDGPPEGSTSGAMSDDSEMRAAAGGAAVEGGQGADGVGNASGDWHCDSTWSEGHVTTTSTRTWVLPTYNNHLYKRLGESLQSNTYNGFSTPWGYFDFNRFHCHFSPRDWQRLINNNWGMRPKAMRVKIFNIQVKEVTTSNGETTVANNLTSTVQIFADSSYELPYVMDAGQEGSLPPFPNDVFMVPQYGYCGLVTGNTSQQQTDRNAFYCLEYFPSQMLRTGNNFEITYSFEKVPFHSMYAHSQSLDRLMNPLIDQYLWGLQSTTTGTTLNAGTATTNFTKLRPTNFSNFKKNWLPGPSIKQQGFSKTANQNYSIPATGSDSLISYETHSTLDGRWSALTPGPPRATAGPADSKFSNSQLIFAGPKQNGNTATVPGTLIFTSEEELAATNATDTDMWGNLPRHDSSLSNLPTVDRNTGLGAVPGMVWQNRDIYYQGPIWAKIPHTDGHFHPSPLIGGFGLKHPPPQIFIKNTPVPANPATTFSSTPVNSFITQYSTGQVSVQIDWEIQKERSKRWNPEVQFTSNYGQQNSLLWAPDAAGKYTEPRAIGTRYLTHHL

SEQ ID NO: 1141 - protein, 735 aa, Artificial Sequence
  source: /note="Description of Artificial Sequence: Synthetic polypeptide"
MAADGYLPDWLEDNLSEGVREWWALQPGAPKPKANQQHQDNARGLVLPGYKYLGPGNGLDKGEPVNAADAAALEHDKAYDQQLKAGDNPYLKYNHADAEFQQRLQGDTSFGGNLGRAVFQAKKRVLEPLGLVEQAGETAPGKKRPLIESPQQPDSSTGIGKKGKQPAKKKLVFEDETGAGDGPPEGSTSGAMSDDSEMRAAAGGAAVEGGQGADGVGNASGDWHCDSTWSEGHVTTTSTRTWVLPTYNNHLYKRLGESLQSNTYNGFSTPWGYFDFNRFHCHFSPRDWQRLINNNWGMRPKAMRVKIFNIQVKEVTTSNGETTVANNLTSTVQIFADSSYELPYVMDAGQEGSLPPFPNDVFMVPQYGYCGLVTGNTSQQQTDRNAFYCLEYFPSQMLRTGNNFEITYSFEKVPFHSMYAHSQSLDRLMNPLIDQYLWGLQSTTTGTTLNAGTATTNFTKLRPTNFSNFKKNWLPGPSIKQQGFSKTANQNYFIPATGSDSLIRYETHSTLDGRWSALTPGPPLATAGPADSKFSNSQLIFAGPKQNGNTATVPGTLIFTSEEELAATNATDTDMWGNLPVIDFSKSNLPTVDRLTHLGAVPGMVWQNRDIYYQGPIWAKIPHTDGHFHPSPLIGGFGLKHPPPQIFIKNTPVPANPATTFSSTPVNSFITQYSTGQVSVQIDWEIQKERSKRWNPEVQFTSNYGQQNSLLWAPDAAGKYTEPRAIGTRYLTHHL

SEQ ID NO: 1142 - protein, 735 aa, Artificial Sequence
  source: /note="Description of Artificial Sequence: Synthetic polypeptide"
MAADGYLPDWLEDNLSEGVREWWALQPGAPKPKANQQHQDNARGLVLPGYKYLGPGNGLDKGEPVNAADAAALEHDKAYDQQLKAGDNPYLKYNHADAEFQQRLQGDTSFGGNLGRAVFQAKKRVLEPLGLVEQAGETAPGKKRPLIESPQQPDSSTGIGKKGKQPAKKKLVFEDETGAGDGPPEGSTSGAMSDDSEMRAAAGGAAVEGGQGADGVGNASGDWHCDSTWSEGHVTTTSTRTWVLPTYNNHLYKRLGESLQSNTYNGFSTPWGYFDFNRFHCHFSPRDWQRLINNNWGMRPKAMRVKIFNIQVKEVTTSNGETTVANNLTSTVQIFADSSYELPYVMDAGQEGSLPPFPNDVFMVPQYGYCGLVTGNTSQQQTDRNAFYCLEYFPSQMLRTGNNFEITYSFEKVPFHSMYAHSQSLDRLMNPLIDQYLWGLQSTTTGTTLNAGTATTNFTKLRPTNFSNFKKNWLPGPSIKQQGFSKTANQNYKIPATGSDSLIKYETHSTLDGRWSALTPGPPMATAGPADSKFSNSQLIFAGPKQNGNTATVPGTLIFTSEEELAATNATDTDMWGNLPVRDFSLSNLPTVDRTTKLGAVPGMVWQNRDIYYQGPIWAKIPHTDGHFHPSPLIGGFGLKHPPPQIFIKNTPVPANPATTFSSTPVNSFITQYSTGQVSVQIDWEIQKERSKRWNPEVQFTSNYGQQNSLLWAPDAAGKYTEPRAIGTRYLTHHL

SEQ ID NO: 1143 - protein, 735 aa, Artificial Sequence
  source: /note="Description of Artificial Sequence: Synthetic polypeptide"
MAADGYLPDWLEDNLSEGVREWWALQPGAPKPKANQQHQDNARGLVLPGYKYLGPGNGLDKGEPVNAADAAALEHDKAYDQQLKAGDNPYLKYNHADAEFQQRLQGDTSFGGNLGRAVFQAKKRVLEPLGLVEQAGETAPGKKRPLIESPQQPDSSTGIGKKGKQPAKKKLVFEDETGAGDGPPEGSTSGAMSDDSEMRAAAGGAAVEGGQGADGVGNASGDWHCDSTWSEGHVTTTSTRTWVLPTYNNHLYKRLGESLQSNTYNGFSTPWGYFDFNRFHCHFSPRDWQRLINNNWGMRPKAMRVKIFNIQVKEVTTSNGETTVANNLTSTVQIFADSSYELPYVMDAGQEGSLPPFPNDVFMVPQYGYCGLVTGNTSQQQTDRNAFYCLEYFPSQMLRTGNNFEITYSFEKVPFHSMYAHSQSLDRLMNPLIDQYLWGLQSTTTGTTLNAGTATTNFTKLRPTNFSNFKKNWLPGPSIKQQGFSKTANQNYFIPATGSDSLIQYETHSTLDGRWSALTPGPPMATAGPADSKFSNSQLIFAGPKQNGNTATVPGTLIFTSEEELAATNATDTDMWGNLPGGDQSNSNLPTVDRLTALGAVPGMVWQNRDIYYQGPIWAKIPHTDGHFHPSPLIGGFGLKHPPPQIFIKNTPVPANPATTFSSTPVNSFITQYSTGQVSVQIDWEIQKERSKRWNPEVQFTSNYGQQNSLLWAPDAAGKYTEPRAIGTRYLTHHL

SEQ ID NO: 1144 - protein, 735 aa, Artificial Sequence
  source: /note="Description of Artificial Sequence: Synthetic polypeptide"
MAADGYLPDWLEDNLSEGVREWWALQPGAPKPKANQQHQDNARGLVLPGYKYLGPGNGLDKGEPVNAADAAALEHDKAYDQQLKAGDNPYLKYNHADAEFQQRLQGDTSFGGNLGRAVFQAKKRVLEPLGLVEQAGETAPGKKRPLIESPQQPDSSTGIGKKGKQPAKKKLVFEDETGAGDGPPEGSTSGAMSDDSEMRAAAGGAAVEGGQGADGVGNASGDWHCDSTWSEGHVTTTSTRTWVLPTYNNHLYKRLGESLQSNTYNGFSTPWGYFDFNRFHCHFSPRDWQRLINNNWGMRPKAMRVKIFNIQVKEVTTSNGETTVANNLTSTVQIFADSSYELPYVMDAGQEGSLPPFPNDVFMVPQYGYCGLVTGNTSQQQTDRNAFYCLEYFPSQMLRTGNNFEITYSFEKVPFHSMYAHSQSLDRLMNPLIDQYLWGLQSTTTGTTLNAGTATTNFTKLRPTNFSNFKKNWLPGPSIKQQGFSKTANQNYEMPATGSDSLIIYETHSTLDGRWSALTPGPPFATAGPADSKFSNSQLIFAGPKQNGNTATVPGTLIFTSEEELAATNATDTDVWGNLPSGDHSQSNLPTVDRPTMLGAVPGMVWQNRDIYYQGPIWAKIPHTDGHFHPSPLIGGFGLKHPPPQIFIKNTPVPANPATTFISTPVNSFITQYSTGQVSVHIDWEIQKERSKRWNPEVQFTSDYGQHSSLLWAPDAAGKYTEPTAIGTRYLTHHL

SEQ ID NO: 1145 - protein, 734 aa, Artificial Sequence
  source: /note="Description of Artificial Sequence: Synthetic polypeptide"
MAADGYLPDWLEDNLSEGVREWWALQPGAPKPKANQQHQDNARGLVLPGYKYLGPGNGLDKGEPVNAADAAALEHDKAYDQQLKAGDNPYLKYNHADAEFQQRLQGDTSFGGNLGRAVFQAKKRVLEPLGLVEQAGETAPGKKRPLIESPQQPDSSTGIGKKGKQPAKKKLVFEDETGAGDGPPEGSTSGAMSDDSEMRAAAGGAAVEGGQGADGVGNASGDWHCDSTWSEGHVTTTSTRTWVLPTYNNHLYKRLGESLQSNTYNGFSTPWGYFDFNRFHCHFSPRDWQRLINNNWGMRPKAMRVKIFNIQVKEVTTSNGETTVANNLTSTVQIFADSSYELPYVMDAGQEGSLPPFPNDVFMVPQYGYCGLVTGNTSQQQTDRNAFYCLEYFPSQMLRTGNNFEITYSFEKVPFHSMYAHSQSLDRLMNPLIDQYLWGLQSTTTGTTLNAGTATTNFTKLRPTNFSNFKKNWLPGPSIKQQGFSKTANQNDIPATGSDSLIKYETHSTLDGRWSALTPGPPMATAGPADSKFSNSQLIFAGPKQNGNTATVPGTLIFTSEEELAATNATDTDMWGNLPGGDQSNSNLPTVDRLTALGAVPGMVWQNRDIYYQGPIWAKIPHTDGHFHPSPLIGGFGLKHPPPQIFIKNTPVPANPATTFSSTPVNSFITQYSTGQVSVQIDWEIQKERSKRWNPEVQFTSNYGQQNSLLWAPDAAGKYTEPRAIGTRYLTHHL

SEQ ID NO: 1146 - protein, 735 aa, Artificial Sequence
  source: /note="Description of Artificial Sequence: Synthetic polypeptide"
MAADGYLPDWLEDNLSEGVREWWALQPGAPKPKANQQHQDNARGLVLPGYKYLGPGNGLDKGEPVNAADAAALEHDKAYDQQLKAGDNPYLKYNHADAEFQQRLQGDTSFGGNLGRAVFQAKKRVLEPLGLVEQAGETAPGKKRPLIESPQQPDSSTGIGKKGKQPAKKKLVFEDETGAGDGPPEGSTSGAMSDDSEMRAAAGGAAVEGGQGADGVGNASGDWHCDSTWSEGHVTTTSTRTWVLPTYNNHLYKRLGESLQSNTYNGFSTPWGYFDFNRFHCHFSPRDWQRLINNNWGMRPKAMRVKIFNIQVKEVTTSNGETTVANNLTSTVQIFADSSYELPYVMDAGQEGSLPPFPNDVFMVPQYGYCGLVTGNTSQQQTDRNAFYCLEYFPSQMLRTGNNFEITYSFEKVPFHSMYAHSQSLDRLMNPLIDQYLWGLQSTTTGTTLNAGTATTNFTKLRPTNFSNFKKNWLPGPSIKQQGFSKTANQNYIIPATGSDSLITYETHSTLDGRWSALTPGPPVATAGPADSKFSNSQLIFAGPKQNGNTATVPGTLIFTSEEELAATNATDTDMWGNLPFNDDSSSNLPTVDRSTFLGAVPGMVWQNRDIYYQGPIWAKIPHTDGHFHPSPLIGGFGLKHPPPQIFIKNTPVPANPATTFSSTPVNSFITQYSTGQVSVQIDWEIQKERSKRWNPEVQFTSNYGQQNSLLWAPDAAGKYTEPRAIGTRYLTHHL

SEQ ID NO: 1147 - protein, 733 aa, Artificial Sequence
  source: /note="Description of Artificial Sequence: Synthetic polypeptide"
MAADGYLPDWLEDNLSEGIREWWDLKPGAPKPKANQQKQDDGRGLVLPGYKYLGPFNGLDKGEPVNAADAAALEHDKAYDQQLKAGDNPYLRYNHADAEFQERLQEDTSFGGNLGRAVFQAKKRVLEPLGLVEEGAKTAPGKKRPLESPQEPDSSSGIGKKGKQPARKRLNFEEDTGAGDGPPEGSDTSAMSSDIEMRAAPGGNAVDAGQGSDGVGNASGDWHCDSTWSEGKVTTTSTRTWVLPTYNNHLYLRLGTTSSSNTYNGFSTPWGYFDFNRFHCHFSPRDWQRLINNNWGLRPKAMRVKIFNIQVKEVTTSNGETTVANNLTSTVQIFADSSYELPYVMDAGQEGSLPPFPNDVFMVPQYGYCGIVTGENQNQTDRNAFYCLEYFPSQMLRTGNNFEMAYNFEKVPFHSMYAHSQSLDRLMNPLLDQYLWHLQSTTSGETLNQGNAATTFGKIRSGDFAFYRKNWLPGPCVKQQRFSKTASQNYKIPASGGNALLKYDTHYTLNNRWSNIAPGPPMATAGPSDGDFSNAQLIFPGPSVTGNTTTSANNLLFTSEEEIAATNPRDTDMFGQIADNNQNATTAPITGNVTAMGVLPGMVWQNRDIYYQGPIWAKIPHADGHFHPSPLIGGFGLKHPPPQIFIKNTPVPANPATTFTAARVDSFITQYSTGQVAVQIEWEIEKERSKRWNPEVQFTSNYGNQSSMLWAPDTTGKYTEPRVIGSRYLTNHL

SEQ ID NO: 1148 - protein, 742 aa, Artificial Sequence; identical to SEQ ID NO: 959
  source: /note="Description of Artificial Sequence: Synthetic polypeptide"

SEQ ID NO: 1149 - protein, 733 aa, Artificial Sequence; identical to SEQ ID NO: 432
  source: /note="Description of Artificial Sequence: Synthetic polypeptide"

SEQ ID NO: 1150 - protein, 733 aa, Artificial Sequence; identical to SEQ ID NO: 149
  source: /note="Description of Artificial Sequence: Synthetic polypeptide"

SEQ ID NO: 1151 - protein, 733 aa, Artificial Sequence; identical to SEQ ID NO: 436
  source: /note="Description of Artificial Sequence: Synthetic polypeptide"

SEQ ID NO: 1152 - protein, 735 aa, Artificial Sequence
  source: /note="Description of Artificial Sequence: Synthetic polypeptide"
MAADGYLPDWLEDNLSEGVREWWALQPGAPKPKANQQHQDNARGLVLPGYKYLGPGNGLDKGEPVNAADAAALEHDKAYDQQLKAGDNPYLKYNHADAEFQQRLQGDTSFGGNLGRAVFQAKKRVLEPLGLVEQAGETAPGKKRPLIESPQQPDSSTGIGKKGKQPAKKKLVFEDETGAGDGPPEGSTSGAMSDDSEMRAAAGGAAVEGGQGADGVGNASGDWHCDSTWSEGHVTTTSTRTWVLPTYNNHLYKRLGESLQSNTYNGFSTPWGYFDFNRFHCHFSPRDWQRLINNNWGMRPKAMRVKIFNIQVKEVTTSNGETTVANNLTSTVQIFADSSYELPYVMDAGQEGSLPPFPNDVFMVPQYGYCGLVTGNTSQQQTDRNAFYCLEYFPSQMLRTGNNFEITYSFEKVPFHSMYAHSQSLDRLMNPLIDQYLWGLQSTTTGTTLNAGTATTNFTKLRPTNFSNFKKNWLPGPSIKQQGFSKTANQNYEIPATGSDSLIEYETHSTLDGRWSALTPGPPMATAGPADSKFSNSQLIFAGPKQNGNTATVPGTLIFTSEEELAATNATDTDMWGNLPGGDQSSSNLPTVDRLTALGAVPGMVWQNRDIYYQGPIWAKIPHTDGHFHPSPLIGGFGLKHPPPQIFIKNTPVPANPATTFSSTPVNSFITQYSTGQVSVQIDWEIQKERSKRWNPEVQFTSNYGQQNSLLWAPDAAGKYTEPRAIGTRYLTHHL

SEQ ID NO: 1153 - protein, 735 aa, Artificial Sequence
  source: /note="Description of Artificial Sequence: Synthetic polypeptide"
MAADGYLPDWLEDNLSEGVREWWALQPGAPKPKANQQHQDNARGLVLPGYKYLGPGNGLDKGEPVNAADAAALEHDKAYDQQLKAGDNPYLKYNHADAEFQQRLQGDTSFGGNLGRAVFQAKKRVLEPLGLVEQAGETAPGKKRPLIESPQQPDSSTGIGKKGKQPAKKKLVFEDETGAGDGPPEGSTSGAMSDDSEMRAAAGGAAVEGGQGADGVGNASGDWHCDSTWSEGHVTTTSTRTWVLPTYNNHLYKRLGESLQSNTYNGFSTPWGYFDFNRFHCHFSPRDWQRLINNNWGMRPKAMRVKIFNIQVKEVTTSNGETTVANNLTSTVQIFADSSYELPYVMDAGQEGSLPPFPNDVFMVPQYGYCGLVTGNTSQQQTDRNAFYCLEYFPSQMLRTGNNFEITYSFEKVPFHSMYAHSQSLDRLMNPLIDQYLWGLQSTTTGTTLNAGTATTNFTKLRPTNFSNFKKNWLPGPSIKQQGFSKTANQNYEIPATGSDSLIEYETHSTLDGRWSALTPGPPMATAGPADSKFSNSQLIFAGPKQNGNTATVPGTLIFTSEEELAATNATDTDMWGNLPGGDQSSSNLPVVRGLRALGAVPGMVWQNRDIYYQGPIWAKIPHTDGHFHPSPLIGGFGLKHPPPQIFIKNTPVPANPATTFSSTPVNSFITQYSTGQVSVQIDWEIQKERSKRWNPEVQFTSNYGQQNSLLWAPDAAGKYTEPRAIGTRYLTHHL

SEQ ID NO: 1154 - protein, 735 aa, Artificial Sequence
  source: /note="Description of Artificial Sequence: Synthetic polypeptide"
MAADGYLPDWLEDNLSEGVREWWALQPGAPKPKANQQHQDNARGLVLPGYKYLGPGNGLDKGEPVNAADAAALEHDKAYDQQLKAGDNPYLKYNHADAEFQQRLQGDTSFGGNLGRAVFQAKKRVLEPLGLVEQAGETAPGKKRPLIESPQQPDSSTGIGKKGKQPAKKKLVFEDETGAGDGPPEGSTSGAMSDDSEMRAAAGGAAVEGGQGADGVGNASGDWHCDSTWSEGHVTTTSTRTWVLPTYNNHLYKRLGESLQSNTYNGFSTPWGYFDFNRFHCHFSPRDWQRLINNNWGMRPKAMRVKIFNIQVKEVTTSNGETTVANNLTSTVQIFADSSYELPYVMDAGQEGSLPPFPNDVFMVPQYGYCGLVTGNTSQQQTDRNAFYCLEYFPSQMLRTGNNFEITYSFEKVPFHSMYAHSQSLDRLMNPLIDQYLWGLQSTTTGTTLNAGTATTNFTKLRPTNFSNFKKNWLPGPSIKQQGFSKTANQNYEIPATGSDSLIEYETHSTLDGRWSALTPGPPMATAGPADSKFSNSQLIFAGPKQNGNTATVPGTLIFTSEEELAATNATDTDMWGNLPGGDQSSSNLPVVNRLSALGAVPGMVWQNRDIYYQGPIWAKIPHTDGHFHPSPLIGGFGLKHPPPQIFIKNTPVPANPATTFSSTPVNSFITQYSTGQVSVQIDWEIQKERSKRWNPEVQFTSNYGQQNSLLWAPDAAGKYTEPRAIGTRYLTHHL

SEQ ID NO: 1155 - protein, 735 aa, Artificial Sequence
  source: /note="Description of Artificial Sequence: Synthetic polypeptide"
MAADGYLPDWLEDNLSEGVREWWALQPGAPKPKANQQHQDNARGLVLPGYKYLGPGNGLDKGEPVNAADAAALEHDKAYDQQLKAGDNPYLKYNHADAEFQQRLQGDTSFGGNLGRAVFQAKKRVLEPLGLVEQAGETAPGKKRPLIESPQQPDSSTGIGKKGKQPAKKKLVFEDETGAGDGPPEGSTSGAMSDDSEMRAAAGGAAVEGGQGADGVGNASGDWHCDSTWSEGHVTTTSTRTWVLPTYNNHLYKRLGESLQSNTYNGFSTPWGYFDFNRFHCHFSPRDWQRLINNNWGMRPKAMRVKIFNIQVKEVTTSNGETTVANNLTSTVQIFADSSYELPYVMDAGQEGSLPPFPNDVFMVPQYGYCGLVTGNTSQQQTDRNAFYCLEYFPSQMLRTGNNFEITYSFEKVPFHSMYAHSQSLDRLMNPLIDQYLWGLQSTTTGTTLNAGTATTNFTKLRPTNFSNFKKNWLPGPSIKQQGFSKTANQNYEIPATGSDSLIEYETHSTLDGRWSALTPGPPMATAGPADSKFSNSQLIFAGPKQNGNTATVPGTLIFTSEEELAATNATDTDMWGNLPGGDQSSSNLPPVMGLGALGAVPGMVWQNRDIYYQGPIWAKIPHTDGHFHPSPLIGGFGLKHPPPQIFIKNTPVPANPATTFSSTPVNSFITQYSTGQVSVQIDWEIQKERSKRWNPEVQFTSNYGQQNSLLWAPDAAGKYTEPRAIGTRYLTHHL

SEQ ID NO: 1156 - protein, 736 aa, Artificial Sequence
  source: /note="Description of Artificial Sequence: Synthetic polypeptide"
MAADGYLPDWLEDNLSEGVREWWALQPGAPKPKANQQHQDNARGLVLPGYKYLGPGNGLDKGEPVNAADAAALEHDKAYDQQLKAGDNPYLKYNHADAEFQQRLQGDTSFGGNLGRAVFQAKKRVLEPLGLVEQAGETAPGKKRPLIESPQQPDSSTGIGKKGKQPAKKKLVFEDETGAGDGPPEGSTSGAMSDDSEMRAAAGGAAVEGGQGADGVGNASGDWHCDSTWSEGHVTTTSTRTWVLPTYNNHLYKRLGESLQSNTYNGFSTPWGYFDFNRFHCHFSPRDWQRLINNNWGMRPKAMRVKIFNIQVKEVTTSNGETTVANNLTSTVQIFADSSYELPYVMDAGQEGSLPPFPNDVFMVPQYGYCGLVTGNTSQQQTDRNAFYCLEYFPSQMLRTGNNFEITYSFEKVPFHSMYAHSQSLDRLMNPLIDQYLWGLQSTTTGTTLNAGTATTNFTKLRPTNFSNFKKNWLPGPSIKQQGFSKTANQNYEIPATGSDSLIEYETHSTLDGRWSALTPGPPMATAGPADSKFSNSQLIFAGPKQNGNTATVPGTLIFTSEEELAATNATDTDMWGNLPGGDQSRVDRLPTVDRLTALGAVPGMVWQNRDIYYQGPIWAKIPHTDGHFHPSPLIGGFGLKHPPPQIFIKNTPVPANPATTFSSTPVNSFITQYSTGQVSVQIDWEIQKERSKRWNPEVQFTSNYGQQNSLLWAPDAAGKYTEPRAIGTRYLTHHL

SEQ ID NO: 1157 - protein, 736 aa, Artificial Sequence
  source: /note="Description of Artificial Sequence: Synthetic polypeptide"
MAADGYLPDWLEDNLSEGVREWWALQPGAPKPKANQQHQDNARGLVLPGYKYLGPGNGLDKGEPVNAADAAALEHDKAYDQQLKAGDNPYLKYNHADAEFQQRLQGDTSFGGNLGRAVFQAKKRVLEPLGLVEQAGETAPGKKRPLIESPQQPDSSTGIGKKGKQPAKKKLVFEDETGAGDGPPEGSTSGAMSDDSEMRAAAGGAAVEGGQGADGVGNASGDWHCDSTWSEGHVTTTSTRTWVLPTYNNHLYKRLGESLQSNTYNGFSTPWGYFDFNRFHCHFSPRDWQRLINNNWGMRPKAMRVKIFNIQVKEVTTSNGETTVANNLTSTVQIFADSSYELPYVMDAGQEGSLPPFPNDVFMVPQYGYCGLVTGNTSQQQTDRNAFYCLEYFPSQMLRTGNNFEITYSFEKVPFHSMYAHSQSLDRLMNPLIDQYLWGLQSTTTGTTLNAGTATTNFTKLRPTNFSNFKKNWLPGPSIKQQGFSKTANQNYEIPATGSDSLIEYETHSTLDGRWSALTPGPPMATAGPADSKFSNSQLIFAGPKQNGNTATVPGTLIFTSEEELAATNATDTDMWGNLPGGDQSRALRLPTVDRLTALGAVPGMVWQNRDIYYQGPIWAKIPHTDGHFHPSPLIGGFGLKHPPPQIFIKNTPVPANPATTFSSTPVNSFITQYSTGQVSVQIDWEIQKERSKRWNPEVQFTSNYGQQNSLLWAPDAAGKYTEPRAIGTRYLTHHL

SEQ ID NO: 1158 - DNA, 1172 bp, Artificial Sequence
  source: /note="Description of Artificial Sequence: Synthetic polynucleotide"
cttaattaggctgcgcgctcgctcgctcactgaggccgcccgggcaaagcccgggcgtcgggcgacctttggtcgcccggcctcagtgagcgagcgagcgcgcagagagggagtggccaactccatcactaggggttccttgtagttaatgattaacccgccatgctacttatctaccagggtaatggggatcctctagaactatagctagtcgacattgattattgactagttattaatagtaatcaattacggggtcattagttcatagcccatatatggagttccgcgttacataacttacggtaaatggcccgcctggctgaccgcccaacgacccccgcccattgacgtcaataatgacgtatgttcccatagtaacgccaatagggactttccattgacgtcaatgggtggactatttacggtaaactgcccacttggcagtacatcaagtgtatcatatgccaagtacgccccctattgacgtcaatgacggtaaatggcccgcctggcattatgcccagtacatgaccttatgggactttcctacttggcagtacatctacgtattagtcatcgctattaccatgtcgaggccacgttctgcttcactctccccatctcccccccctccccacccccaattttgtatttatttattttttaattattttgtgcagcgatgggggcggggggggggggcgcgcgccaggcggggcggggcggggcgaggggcggggcggggcgaggcggagaggtgcggcggcagccaatcagagcggcgcgctccgaaagtttccttttatggcgaggcggcggcggcggcggccctataaaaagcgaagcgcgcggcgggcgggagcaagctttattgcggtagtttatcacagttaaattgctaacgcagtcagtgcttctgacacaacagtctcgaacttaagctgcagaagttggtcgtgaggcactgggcaggtaagtatcaaggttacaagacaggtttaaggagaccaatagaaactgggcttgtcgagacagagaagactcttgcgtttctgataggcacctattggtcttactgacatccactttgcctttctctccacaggtgtccactcccagttcaattacagctcttaaggctagagtacttaatacgactcsactatagg

SEQ ID NO: 1159 - DNA, 3231 bp, Artificial Sequence
  source: /note="Description of Artificial Sequence: Synthetic polynucleotide"
taagaattcacgcgtggtacctctagagtcgacccgggcggcctcgaggacggggtgaactacgcctgaggatccgatctttttccctctgccaaaaattatggggacatcatgaagccccttgagcatctgacttctggctaataaaggaaatttattttcattgcaatagtgtgttggaattttttgtgtctctcactcggaagcaattcgttgatctgaatttcgaccacccataatacccattaccctggtagataagtagcatggcgggttaatcattaactacaaggaacccctagtgatggagttggccactccctctctgcgcgctcgctcgctcactgaggccgggcgaccaaaggtcgcccgacgcccgggctttgcccgggcggcctcagtgagcgagcgagcgcgcagccttaattaacctaattcactggccgtcgttttacaacgtcgtgactgggaaaaccctggcgttacccaacttaatcgccttgcagcacatccccctttcgccagctggcgtaatagcgaagaggcccgcaccgatcgcccttcccaacagttgcgcagcctgaatggcgaatgggacgcgccctgtagcggcgcattaagcgcggcgggtgtggtggttacgcgcagcgtgaccgctacacttgccagcgccctagcgcccgctcctttcgctttcttcccttcctttctcgccacgttcgccggctttccccgtcaagctctaaatcgggggctccctttagggttccgatttagtgctttacggcacctcgaccccaaaaaacttgattagggtgatggttcacgtagtgggccatcgccctgatagacggtttttcgccctttgacgttggagtccacgttctttaatagtggactcttgttccaaactggaacaacactcaaccctatctcggtctattcttttgatttataagggattttgccgatttcggcctattggttaaaaaatgagctgatttaacaaaaatttaacgcgaattttaacaaaatattaacgcttacaatttaggtggcacttttcggggaaatgtgcgcggaacccctatttgtttatttttctaaatacattcaaatatgtatccgctcatgagacaataaccctgataaatgcttcaataatattgaaaaaggaagagtatgagtattcaacatttccgtgtcgcccttattcccttttttgcggcattttgccttcctgtttttgctcacccagaaacgctggtgaaagtaaaagatgctgaagatcagttgggtgcacgagtgggttacatcgaactggatctcaacagcggtaagatccttgagagttttcgccccgaagaacgttttccaatgatgagcacttttaaagttctgctatgtggcgcggtattatcccgtattgacgccgggcaagagcaactcggtcgccgcatacactattctcagaatgacttggttgagtactcaccagtcacagaaaagcatcttacggatggcatgacagtaagagaattatgcagtgctgccataaccatgagtgataacactgcggccaacttacttctgacaacgatcggaggaccgaaggagctaaccgcttttttgcacaacatgggggatcatgtaactcgccttgatcgttgggaaccggagctgaatgaagccataccaaacgacgagcgtgacaccacgatgcctgtagcaatggcaacaacgttgcgcaaactattaactggcgaactacttactctagcttcccggcaacaattaatagactggatggaggcggataaagttgcaggaccacttctgcgctcggcccttccggctggctggtttattgctgataaatctggagccggtgagcgtgggtctcgcggtatcattgcagcactggggccagatggtaagccctcccgtatcgtagttatctacacgacggggagtcaggcaactatggatgaacgaaatagacagatcgctgagataggtgcctcactgattaagcattggtaactgtcagaccaagtttactcatatatactttagattgatttaaaacttcatttttaatttaaaaggatctaggtgaagatcctttttgataatctcatgaccaaaatcccttaacgtgagttttcgttccactgagcgtcagaccccgtagaaaagatcaaaggatcttcttgagatcctttttttctgcgcgtaatctgctgcttgcaaacaaaaaaaccaccgctaccagcggtggtttgtttgccggatcaagagctaccaactctttttccgaaggtaactggcttcagcagagcgcagataccaaatactgttcttctagtgtagccgtagttaggccaccacttcaagaactctgtagcaccgcctacatacctcgctctgctaatcctgttaccagtggctgctgccagtggcgataagtcgtgtcttaccgggttggactcaagacgatagttaccggataaggcgcagcggtcgggctgaacggggggttcgtgcacacagcccagcttggagcgaacgacctacaccgaactgagatacctacagcgtgagctatgagaaagcgccacgcttcccgaagggagaaaggcggacaggtatccggtaagcggcagggtcggaacaggagagcgcacgagggagcttccagggggaaacgcctggtatctttatagtcctgtcgggtttcgccacctctgacttgagcgtcgatttttgtgatgctcgtcaggggggcggagcctatggaaaaacgccagcaacgcggcctttttacggttcctggccttttgctggccttttgctcacatgttctttcctgcgttatcccctgattctgtggataaccgtattaccgcctttgagtgagctgataccgctcgccgcagccgaacgaccgagcgcagcgagtcagtgagcgaggaagcggaagagcgcccaatacgcaaaccgcctctccccgcgcgttggccgattcattaatgcagctggcacgacaggtttcccgactggaaagcgggcagtgagcgcaacgcaattaatgtgagttagctcactcattaggcaccccaggctttacactttatgcttccggctcgtatgttgtgtggaattgtgagcggataacaatttcacacaggaaacagctatgaccatgattacgccagatttaattaaggc

SEQ ID NO: 1160 - protein, 737 aa, Artificial Sequence
  source: /note="Description of Artificial Sequence: Synthetic polypeptide"
  MOD_RES (264)..(264): Any amino acid
  MOD_RES (266)..(266): Any amino acid
  MOD_RES (268)..(268): Any amino acid
  MOD_RES (448)..(448): Any amino acid
  MOD_RES (459)..(460): Any amino acid
  MOD_RES (467)..(467): Any amino acid
  MOD_RES (470)..(471): Any amino acid
  MOD_RES (474)..(474): Any amino acid
  MOD_RES (495)..(495): Any amino acid
  MOD_RES (516)..(516): Any amino acid
  MOD_RES (533)..(533): Any amino acid
  MOD_RES (547)..(547): Any amino acid
  MOD_RES (551)..(551): Any amino acid
  MOD_RES (555)..(555): Any amino acid
  MOD_RES (557)..(557): Any amino acid
  MOD_RES (561)..(561): Any amino acid
  MOD_RES (563)..(563): Any amino acid
  MOD_RES (577)..(577): Any amino acid
  MOD_RES (583)..(583): Any amino acid
  MOD_RES (593)..(593): Any amino acid
  MOD_RES (596)..(596): Any amino acid
  MOD_RES (661)..(662): Any amino acid
  MOD_RES (664)..(665): Any amino acid
  MOD_RES (710)..(710): Any amino acid
  MOD_RES (717)..(719): Any amino acid
  MOD_RES (723)..(723): Any amino acid
MAADGYLPDWLEDNLSEGIREWWDLKPGAPKPKANQQKQDDGRGLVLPGYKYLGPFNGLDKGEPVNAADAAALEHDKAYDQQLKAGDNPYLRYNHADAEFQERLQEDTSFGGNLGRAVFQAKKRVLEPLGLVEEGAKTAPGKKRPVEPSPQRSPDSSTGIGKKGQQPAKKRLNFGQTGDSESVPDPQPLGEPPAGPSGLGSGTMAAGGGAPMADNNEGADGVGNASGNWHCDSTWLGDRVITTSTRTWALPTYNNHLYKQISSXSXGXTNDNHYFGYSTPWGYFDFNRFHCHFSPRDWQRLINNNWGFRPKRLNFKLFNIQVKEVTTNDGVTTIANNLTSTVQVFSDSEYQLPYVLGSAHQGCLPPFPADVFMIPQYGYLTLNNGSQAVGRSSFYCLEYFPSQMLRTGNNFTFSYTFEDVPFHSSYAHSQSLDRLMNPLIDQYLYYLXRTQSTGGTAGXXELLFSQXGPXXMSXQAKNWLPGPCYRQQRVSKTLXQNNNSNFAWTGATKYHLNGRXSLVNPGVAMATHKDDEXRFFPSSGVLIFGKXGAGXNNTXLXNVMXTXEEEIKTTNPVATEXYGVVAXNLQSSNTAPXTGXVNSQGALPGMVWQNRDVYLQGPIWAKIPHTDGNFHPSPLMGGFGLKHPPPQILIKNTPVPANPPXXFXXAKFASFITQYSTGQVSVEIEWELQKENSKRWNPEIQYTSNYAKSXNVDFAVXXXGVYXEPRPIGTRYLTRNL

SEQ ID NO: 1161 - protein, 737 aa, Artificial Sequence
  source: /note="Description of Artificial Sequence: Synthetic polypeptide"
MAADGYLPDWLEDNLSEGIREWWDLKPGAPKPKANQQKQDDGRGLVLPGYKYLGPFNGLDKGEPVNAADAAALEHDKAYDQQLKAGDNPYLRYNHADAEFQERLQEDTSFGGNLGRAVFQAKKRVLEPLGLVEEGAKTAPGKKRPVEPSPQRSPDSSTGIGKKGQQPAKKRLNFGQTGDSESVPDPQPLGEPPAGPSGLGSGTMAAGGGAPMADNNEGADGVGNASGNWHCDSTWLGDRVITTSTRTWALPTYNNHLYKQISSASSGSTNDNHYFGYSTPWGYFDFNRFHCHFSPRDWQRLINNNWGFRPKRLNFKLFNIQVKEVTTNDGVTTIANNLTSTVQVFSDSEYQLPYVLGSAHQGCLPPFPADVFMIPQYGYLTLNNGSQAVGRSSFYCLEYFPSQMLRTGNNFTFSYTFEDVPFHSSYAHSQSLDRLMNPLIDQYLYYLARTQSTGGTAGNRELLFSQGGPSNMSAQAKNWLPGPCYRQQRVSKTLAQNNNSNFAWTGATKYHLNGRDSLVNPGVAMATHKDDEDRFFPSSGVLIFGKEGAGANNTALENVMLTNEEEIKTTNPVATEQYGVVASNLQSSNTAPATGAVNSQGALPGMVWQNRDVYLQGPIWAKIPHTDGNFHPSPLMGGFGLKHPPPQILIKNTPVPANPPATFTPAKFASFITQYSTGQVSVEIEWELQKENSKRWNPEIQYTSNYAKSTNVDFAVNNEGVYSEPRPIGTRYLTRNL

SEQ ID NO: 1162 - protein, 737 aa, Artificial Sequence
  source: /note="Description of Artificial Sequence: Synthetic polypeptide"
MAADGYLPDWLEDNLSEGIREWWDLKPGAPKPKANQQKQDDGRGLVLPGYKYLGPFNGLDKGEPVNAADAAALEHDKAYDQQLKAGDNPYLRYNHADAEFQERLQEDTSFGGNLGRAVFQAKKRVLEPLGLVEEGAKTAPGKKRPVEPSPQRSPDSSTGIGKKGQQPAKKRLNFGQTGDSESVPDPQPLGEPPAGPSGLGSGTMAAGGGAPMADNNEGADGVGNASGNWHCDSTWLGDRVITTSTRTWALPTYNNHLYKQISSQSSGSTNDNHYFGYSTPWGYFDFNRFHCHFSPRDWQRLINNNWGFRPKRLNFKLFNIQVKEVTTNDGVTTIANNLTSTVQVFSDSEYQLPYVLGSAHQGCLPPFPADVFMIPQYGYLTLNNGSQAVGRSSFYCLEYFPSQMLRTGNNFTFSYTFEDVPFHSSYAHSQSLDRLMNPLIDQYLYYLSRTQSTGGTAGNRELLFSQGGPANMSAQAKNWLPGPCYRQQRVSKTLSQNNNSNFAWTGATKYHLNGRDSLVNPGVAMATHKDDEERFFPSSGVLIFGKQGAGANNTTLDNVMMTSEEEIKTTNPVATEQYGVVASNLQSSNTAPQTGTVNSQGALPGMVWQNRDVYLQGPIWAKIPHTDGNFHPSPLMGGFGLKHPPPQILIKNTPVPANPPAVFSPAKFASFITQYSTGQVSVEIEWELQKENSKRWNPEIQYTSNYAKSTNVDFAVNSEGVYSEPRPIGTRYLTRNL

SEQ ID NO: 1163 - protein, 737 aa, Artificial Sequence
  source: /note="Description of Artificial Sequence: Synthetic polypeptide"
MAADGYLPDWLEDNLSEGIREWWDLKPGAPKPKANQQKQDDGRGLVLPGYKYLGPFNGLDKGEPVNAADAAALEHDKAYDQQLKAGDNPYLRYNHADAEFQERLQEDTSFGGNLGRAVFQAKKRVLEPLGLVEEGAKTAPGKKRPVEPSPQRSPDSSTGIGKKGQQPAKKRLNFGQTGDSESVPDPQPLGEPPAGPSGLGSGTMAAGGGAPMADNNEGADGVGNASGNWHCDSTWLGDRVITTSTRTWALPTYNNHLYKQISSASSGSTNDNHYFGYSTPWGYFDFNRFHCHFSPRDWQRLINNNWGFRPKRLNFKLFNIQVKEVTTNDGVTTIANNLTSTVQVFSDSEYQLPYVLGSAHQGCLPPFPADVFMIPQYGYLTLNNGSQAVGRSSFYCLEYFPSQMLRTGNNFTFSYTFEDVPFHSSYAHSQSLDRLMNPLIDQYLYYLARTQSTGGTAGTRELLFSQGGPSNMSAQAKNWLPGPCYRQQRVSKTLTQNNNSNFAWTGATKYHLNGRDSLVNPGVAMATHKDDEDRFFPSSGVLIFGKQGAGANNTALDNVMITNEEEIKTTNPVATEQYGVVASNLQSSNTAPATGTVNSQGALPGMVWQNRDVYLQGPIWAKIPHTDGNFHPSPLMGGFGLKHPPPQILIKNTPVPANPPTVFSPAKFASFITQYSTGQVSVEIEWELQKENSKRWNPEIQYTSNYAKSTNVDFAVNSEGVYTEPRPIGTRYLTRNL

SEQ ID NO: 1164 - protein, 737 aa, Artificial Sequence
  source: /note="Description of Artificial Sequence: Synthetic polypeptide"
  MOD_RES (264)..(264): Any amino acid
  MOD_RES (448)..(448): Any amino acid
  MOD_RES (459)..(459): Any amino acid
  MOD_RES (470)..(470): Any amino acid
  MOD_RES (495)..(495): Any amino acid
  MOD_RES (533)..(533): Any amino acid
  MOD_RES (547)..(547): Any amino acid
  MOD_RES (555)..(555): Any amino acid
  MOD_RES (557)..(557): Any amino acid
  MOD_RES (561)..(561): Any amino acid
  MOD_RES (563)..(563): Any amino acid
  MOD_RES (593)..(593): Any amino acid
  MOD_RES (596)..(596): Any amino acid
  MOD_RES (661)..(662): Any amino acid
  MOD_RES (664)..(664): Any amino acid
  MOD_RES (718)..(718): Any amino acid
  MOD_RES (723)..(723): Any amino acid
MAADGYLPDWLEDNLSEGIREWWDLKPGAPKPKANQQKQDDGRGLVLPGYKYLGPFNGLDKGEPVNAADAAALEHDKAYDQQLKAGDNPYLRYNHADAEFQERLQEDTSFGGNLGRAVFQAKKRVLEPLGLVEEGAKTAPGKKRPVEPSPQRSPDSSTGIGKKGQQPAKKRLNFGQTGDSESVPDPQPLGEPPAGPSGLGSGTMAAGGGAPMADNNEGADGVGNASGNWHCDSTWLGDRVITTSTRTWALPTYNNHLYKQISSXSSGSTNDNHYFGYSTPWGYFDFNRFHCHFSPRDWQRLINNNWGFRPKRLNFKLFNIQVKEVTTNDGVTTIANNLTSTVQVFSDSEYQLPYVLGSAHQGCLPPFPADVFMIPQYGYLTLNNGSQAVGRSSFYCLEYFPSQMLRTGNNFTFSYTFEDVPFHSSYAHSQSLDRLMNPLIDQYLYYLXRTQSTGGTAGXRELLFSQGGPXNMSAQAKNWLPGPCYRQQRVSKTLXQNNNSNFAWTGATKYHLNGRDSLVNPGVAMATHKDDEXRFFPSSGVLIFGKXGAGANNTXLXNVMXTXEEEIKTTNPVATEQYGVVASNLQSSNTAPXTGXVNSQGALPGMVWQNRDVYLQGPIWAKIPHTDGNFHPSPLMGGFGLKHPPPQILIKNTPVPANPPXXFXPAKFASFITQYSTGQVSVEIEWELQKENSKRWNPEIQYTSNYAKSTNVDFAVNXEGVYXEPRPIGTRYLTRNL

SEQ ID NO: 1165 - protein, 737 aa, Artificial Sequence
  source: /note="Description of Artificial Sequence: Synthetic polypeptide"
  MOD_RES (264)..(264): Any amino acid
  MOD_RES (448)..(448): Any amino acid
  MOD_RES (470)..(470): Any amino acid
  MOD_RES (533)..(533): Any amino acid
  MOD_RES (547)..(547): Any amino acid
  MOD_RES (555)..(555): Any amino acid
  MOD_RES (557)..(557): Any amino acid
  MOD_RES (561)..(561): Any amino acid
  MOD_RES (563)..(563): Any amino acid
  MOD_RES (593)..(593): Any amino acid
  MOD_RES (596)..(596): Any amino acid
  MOD_RES (662)..(662): Any amino acid
  MOD_RES (664)..(664): Any amino acid
  MOD_RES (718)..(718): Any amino acid
MAADGYLPDWLEDNLSEGIREWWDLKPGAPKPKANQQKQDDGRGLVLPGYKYLGPFNGLDKGEPVNAADAAALEHDKAYDQQLKAGDNPYLRYNHADAEFQERLQEDTSFGGNLGRAVFQAKKRVLEPLGLVEEGAKTAPGKKRPVEPSPQRSPDSSTGIGKKGQQPAKKRLNFGQTGDSESVPDPQPLGEPPAGPSGLGSGTMAAGGGAPMADNNEGADGVGNASGNWHCDSTWLGDRVITTSTRTWALPTYNNHLYKQISSXSSGSTNDNHYFGYSTPWGYFDFNRFHCHFSPRDWQRLINNNWGFRPKRLNFKLFNIQVKEVTTNDGVTTIANNLTSTVQVFSDSEYQLPYVLGSAHQGCLPPFPADVFMIPQYGYLTLNNGSQAVGRSSFYCLEYFPSQMLRTGNNFTFSYTFEDVPFHSSYAHSQSLDRLMNPLIDQYLYYLXRTQSTGGTAGNRELLFSQGGPXNMSAQAKNWLPGPCYRQQRVSKTLSQNNNSNFAWTGATKYHLNGRDSLVNPGVAMATHKDDEXRFFPSSGVLIFGKXGAGANNTXLXNVMXTXEEEIKTTNPVATEQYGVVASNLQSSNTAPXTGXVNSQGALPGMVWQNRDVYLQGPIWAKIPHTDGNFHPSPLMGGFGLKHPPPQILIKNTPVPANPPAXFXPAKFASFITQYSTGQVSVEIEWELQKENSKRWNPEIQYTSNYAKSTNVDFAVNXEGVYSEPRPIGTRYLTRNL

SEQ ID NO: 1166 - DNA, 2217 bp, Artificial Sequence
  source: /note="Description of Artificial Sequence: Synthetic polynucleotide"
atggctgccgatggttatcttccagattggctcgaggacactctctctgaaggaataagacagtggtggaagctcaaacctggcccaccaccaccaaagcccgcagagcggcataaggacgacagcaggggtcttgtgcttcctgggtacaagtacctcggacccttcaacggactcgacaagggagagccggtcaacgaggcagacgccgcggccctcgagcacgacaaagcctacgaccggcagctcgacagcggagacaacccgtacctcaagtacaaccacgccgacgcggagtttcaggagcgccttaaagaagatacgtcttttgggggcaacctcggacgagcagtcttccaggcgaaaaagagggttcttgaacctctgggcctggttgaggaacctgttaagacggctccgggaaagaagagaccggtagagccatcaccccagcgttctccagactcctctacgggcatcggcaagaaaggccaacagcccgccagaaaaagactcaattttggtcagactggcgactcagagtcagttccagaccctcaacctctcggagaacctccagcagcgccctctggtgtgggacctaatacaatggctgcaggcggtggcgcaccaatggcagacaataacgaaggcgccgacggagtgggtagttcctcgggaaattggcattgcgattccacatggctgggcgacagagtcatcaccaccagcacccgaacctgggccctgcccacctacaacaaccacctctacaagcaaatctccaacgggacatcgggaggagccaccaacgacaacacctacttcggctacagcaccccctgggggtattttgactttaacagattccactgccacttttcaccacgtgactggcagcgactcatcaacaacaactggggattccggcccaagagactcagcttcaagctcttcaacatccaggtcaaggaggtcacgcagaatgaaggcaccaagaccatcgccaataacctcaccagcaccatccaggtgtttacggactcggagtaccagctgccgtacgttctcggctctgcccaccagggctgcctgcctccgttcccggcggacgtgttcatgattccccagtacggctacctaacactcaacaacggtagtcaggccgtgggacgctcctccttctactgcctggaatactttccttcgcagatgctgagaaccggcaacaacttccagtttacttacaccttcgaggacgtgcctttccacagcagctacgcccacagccagagcttggaccggctgatgaatcctctgattgaccagtacctgtactacttgtctcggactcaaacaacaggaggcacggcaaatacgcagactctgggcttcagccaaggtgggcctaatacaatggccaatcaggcaaagaactggctgccaggaccctgttaccgccaacaacgcgtctcaacgacaaccgggcaaaacaacaatagcaactttgcctggactgctgggaccaaataccatctgaatggaagaaattcattggctaatcctggcatcgctatggcaacacacaaagacgacgaggagcgtttttttcccagtaacgggatcctgatttttggcaaacaaaatgctgccagagacaatgcggattacagcgatgtcatgctcaccagcgaggaagaaatcaaaaccactaaccctgtggctacagaggaatacggtatcgtggcagataacttgcagcagcaaaacacggctcctcaaattggaactgtcaacagccagggggccttacccggtatggtctggcagaaccgggacgtgtacctgcagggtcccatctgggccaagattcctcacacggacggcaacttccacccgtctccgctgatgggcggctttggcctgaaacatcctccgcctcagatcctgatcaagaacacgcctgtacctgcggatcctccgaccaccttcaaccagtcaaagctgaactctttcatcacgcaatacagcaccggacaggtcagcgtggaaattgaatgggagctgcagaaggaaaacagcaagcgctggaaccccgagatccagtacacctccaactactacaaatctacaagtgtggactttgctgttaatacagaaggcgtgtactctgaaccccgccccattggcacccgttacctcacccgtaatctgtaa

SEQ ID NO: 1167 - protein, 733 aa, Artificial Sequence; identical to SEQ ID NO: 952
  source: /note="Description of Artificial Sequence: Synthetic polypeptide"

SEQ ID NO: 1168 - DNA, 2203 bp, Artificial Sequence
  source: /note="Description of Artificial Sequence: Synthetic polynucleotide"
atgtcttttgttgatcaccctccagattggttggaagaagttggtgaaggtcttcgcgagtttttgggccttgaagcgggcccaccgaaaccaaaacccaatcagcagcatcaagatcaagcccgtggtcttgtgctgcctggttataactatctcggacccggaaacggtctcgatcgaggagagcctgtcaacagggcagacgaggtcgcgcgagagcacgacatctcgtacaacgagcagcttgaggcgggagacaacccctacctcaagtacaaccacgcggacgccgagtttcaggagaagctcgccgacgacacatccttcgggggaaacctcggaaaggcagtctttcaggccaagaaaagggttctcgaaccttttggcctggttgaagagggtgctaagacggcccctaccggaaagcggatagacgaccactttccaaaaagaaagaaggctcggaccgaagaggactccaagccttccacctcgtcagacgccgaagctggacccagcggatcccagcagctgcaaatcccagcccaaccagcctcaagtttgggagctgatacaatgtctgcgggaggtggcggcccattgggcgacaataaccaaggtgccgatggagtgggcaatgcctcgggagattggcattgcgattccacgtggatgggggacagagtcgtcaccaagtccacccgaacctgggtgctgcccagctacaacaaccaccagtaccgagagatcaaaagcggctccgtcgacggaagcaacgccaacgcctactttggatacagcaccccctgggggtactttgactttaaccgcttccacagccactggagcccccgagactggcaaagactcatcaacaactactggggcttcagaccccggtccctcagagtcaaaatcttcaacattcaagtcaaagaggtcacggtgcaggactccaccaccaccatcgccaacaacctcacctccaccgtccaagtgtttacggacgacgactaccagctgccctacgtcgtcggcaacgggaccgagggatgcctgccggccttccctccgcaggtctttacgctgccgcagtacggttacgcgacgctgaaccgcgacaacacagaaaatcccaccgagaggagcagcttcttctgcctagagtactttcccagcaagatgctgagaacgggcaacaactttgagtttacctacaactttgaggaggtgcccttccactccagcttcgctcccagtcagaacctgttcaagctggccaacccgctggtggaccagtacttgtaccgcttcgtgagcacaaataacactggcggagtccagttcaacaagaacctggccgggagatacgccaacacctacaaaaactggttcccggggcccatgggccgaacccagggctggaacctgggctccggggtcaaccgcgccagtgtcagcgccttcgccacgaccaataggatggagctcgagggcgcgagttaccaggtgcccccgcagccgaacggcatgaccaacaacctccagggcagcaacacctatgccctggagaacactatgatcttcaacagccagccggcgaacccgggcaccaccgccacgtacctcgagggcaacatgctcatcaccagcgagagcgagacgcagccggtgaaccgcgtggcgtacaacgtcggcgggcaggtggccaccaacaaccagagctccaccactgcccccgcgaccggcacgtacaacctccaggaaatcgtgcccggcagcgtgtggatggagagggacgtgtacctccaaggacccatctgggccaagatcccagagacgggggcgcactttcacccctctccggccatgggcggattcggactcaaacacccaccgcccatgatgctcatcaagaacacgcctgtgcccggaaatatcaccagcttctcggacgtgcccgtcagcagcttcatcacccagtacagcaccgggcaggtcaccgtggagatggagtgggagctcaagaaggaaaactccaagaggtggaacccagagatccagtacacaaacaactacaacgacccccagtttgtggactttgccccggacagcaccggggaatacagaaccaccagacctatcggaacccgataccttacccgacccctttaacccattcatgtcgcataccctcaataaa

SEQ ID NO: 1169 - protein, 724 aa, Artificial Sequence
  source: /note="Description of Artificial Sequence: Synthetic polypeptide"
MSFVDHPPDWLEEVGEGLREFLGLEAGPPKPKPNQQHQDQARGLVLPGYNYLGPGNGLDRGEPVNRADEVAREHDISYNEQLEAGDNPYLKYNHADAEFQEKLADDTSFGGNLGKAVFQAKKRVLEPFGLVEEGAKTAPTGKRIDDHFPKRKKARTEEDSKPSTSSDAEAGPSGSQQLQIPAQPASSLGADTMSAGGGGPLGDNNQGADGVGNASGDWHCDSTWMGDRVVTKSTRTWVLPSYNNHQYREIKSGSVDGSNANAYFGYSTPWGYFDFNRFHSHWSPRDWQRLINNYWGFRPRSLRVKIFNIQVKEVTVQDSTTTIANNLTSTVQVFTDDDYQLPYVVGNGTEGCLPAFPPQVFTLPQYGYATLNRDNTENPTERSSFFCLEYFPSKMLRTGNNFEFTYNFEEVPFHSSFAPSQNLFKLANPLVDQYLYRFVSTNNTGGVQFNKNLAGRYANTYKNWFPGPMGRTQGWNLGSGVNRASVSAFATTNRMELEGASYQVPPQPNGMTNNLQGSNTYALENTMIFNSQPANPGTTATYLEGNMLITSESETQPVNRVAYNVGGQVATNNQSSTTAPATGTYNLQEIVPGSVWMERDVYLQGPIWAKIPETGAHFHPSPAMGGFGLKHPPPMMLIKNTPVPGNITSFSDVPVSSFITQYSTGQVTVEMEWELKKENSKRWNPEIQYTNNYNDPQFVDFAPDSTGEYRTTRPIGTRYLTRPL

SEQ ID NO: 1170 - DNA, 2203 bp, Artificial Sequence
  source: /note="Description of Artificial Sequence: Synthetic polynucleotide"
atgtcttttgttgatcaccctccagattggttggaagaagttggtgaaggtcttcgcgagtttttgggccttgaagcgggcccaccgaaaccaaaacccaatcagcagcatcaagatcaagcccgtggtcttgtgctgcctggttataactatctcggacccggaaacggtctcgatcgaggagagcctgtcaacagggcagacgaggtcgcgcgagagcacgacatctcgtacaacgagcagcttgaggcgggagacaacccctacctcaagtacaaccacgcggacgccgagtttcaggagaagctcgccgacgacacatccttcgggggaaacctcggaaaggcagtctttcaggccaagaaaagggttctcgaaccttttggcctggttgaagagggtgctaagacggcccctaccggaaagcggatagacgaccactttccaaaaagaaagaaggctcggaccgaagaggactccaagccttccacctcgtcagacgccgaagctggacccagcggatcccagcagctgcaaatcccagcccaaccagcctcaagtttgggagctgatacaatgtctgcgggaggtggcggcccattgggcgacaataaccaaggtgccgatggagtgggcaatgcctcgggagattggcattgcgattccacgtggatgggggacagagtcgtcaccaagtccacccgaacctgggtgctgcccagctacaacaaccaccagtaccgagagatcaaaagcggctccgtcgacggaagcaacgccaacgcctactttggatacagcaccccctgggggtactttgactttaaccgcttccacagccactggagcccccgagactggcaaagactcatcaacaactactggggcttcagaccccggtccctcagagtcaaaatcttcaacattcaagtcaaagaggtcacggtgcaggactccaccaccaccatcgccaacaacctcacctccaccgtccaagtgtttacggacgacgactaccagctgccctacgtcgtcggcaacgggaccgagggatgcctgccggccttccctccgcaggtctttacgctgccgcagtacggttacgcgacgctgaaccgcgacaacacagaaaatcccaccgagaggagcagcttcttctgcctagagtactttcccagcaagatgctgagaacgggcaacaactttgagtttacctacaactttgaggaggtgcccttccactccagcttcgctcccagtcagaacctgttcaagctggccaacccgctggtggaccagtacttgtaccgcttcgtgagcacaaataacactggcggagtccagttcaacaagaacctggccgggagatacgccaacacctacaaaaactggttcccggggcccatgggccgaacccagggctggaacctgggctccggggtcaaccgcgccagtgtcagcgccttcgccacgaccaataggatggagctcgagggcgcgagttaccaggtgcccccgcagccgaacggcatgaccaacaacctccagggcagcaacacctatgccctggagaacactatgatcttcaacagccagccggcgaacccgggcaccaccgccacgtacctcgagggcaacatgctcatcaccagcgagagcgagacgcagccggtgaaccgcgtggcgtacaacgtcggcgggcagatggccaccaacaaccagagctccaccactgcccccgcgaccggcacggtcaacctccaggaaatcgtgcccggcagcgtgtggatggagagggacgtgtacctccaaggacccatctgggccaagatcccagagacgggggcgcactttcacccctctccggccatgggcggattcggactcaaacacccaccgcccatgatgctcatcaagaacacgcctgtgcccggaaatatcaccagcttctcggacgtgcccgtcagcagcttcatcacccagtacagcaccgggcaggtcaccgtggagatggagtgggagctcaagaaggaaaactccaagaggtggaacccagagatccagtacacaaacaactacaacgacccccagtttgtggactttgccccggacagcaccggggaatacagaaccaccagacctatcggaacccgataccttacccgacccctttaacccattcatgtcgcataccctcaataaa

SEQ ID NO: 1171 - protein, 724 aa, Artificial Sequence
  source: /note="Description of Artificial Sequence: Synthetic polypeptide"
MSFVDHPPDWLEEVGEGLREFLGLEAGPPKPKPNQQHQDQARGLVLPGYNYLGPGNGLDRGEPVNRADEVAREHDISYNEQLEAGDNPYLKYNHADAEFQEKLADDTSFGGNLGKAVFQAKKRVLEPFGLVEEGAKTAPTGKRIDDHFPKRKKARTEEDSKPSTSSDAEAGPSGSQQLQIPAQPASSLGADTMSAGGGGPLGDNNQGADGVGNASGDWHCDSTWMGDRVVTKSTRTWVLPSYNNHQYREIKSGSVDGSNANAYFGYSTPWGYFDFNRFHSHWSPRDWQRLINNYWGFRPRSLRVKIFNIQVKEVTVQDSTTTIANNLTSTVQVFTDDDYQLPYVVGNGTEGCLPAFPPQVFTLPQYGYATLNRDNTENPTERSSFFCLEYFPSKMLRTGNNFEFTYNFEEVPFHSSFAPSQNLFKLANPLVDQYLYRFVSTNNTGGVQFNKNLAGRYANTYKNWFPGPMGRTQGWNLGSGVNRASVSAFATTNRMELEGASYQVPPQPNGMTNNLQGSNTYALENTMIFNSQPANPGTTATYLEGNMLITSESETQPVNRVAYNVGGQMATNNQSSTTAPATGTVNLQEIVPGSVWMERDVYLQGPIWAKIPETGAHFHPSPAMGGFGLKHPPPMMLIKNTPVPGNITSFSDVPVSSFITQYSTGQVTVEMEWELKKENSKRWNPEIQYTNNYNDPQFVDFAPDSTGEYRTTRPIGTRYLTRPL

SEQ ID NO: 1172 - DNA, 2203 bp, Artificial Sequence
  source: /note="Description of Artificial Sequence: Synthetic polynucleotide"
atgtcttttgttgatcaccctccagattggttggaagaagttggtgaaggtcttcgcgagtttttgggccttgaagcgggcccaccgaaaccaaaacccaatcagcagcatcaagatcaagcccgtggtcttgtgctgcctggttataactatctcggacccggaaacggtctcgatcgaggagagcctgtcaacagggcagacgaggtcgcgcgagagcacgacatctcgtacaacgagcagcttgaggcgggagacaacccctacctcaagtacaaccacgcggacgccgagtttcaggagaagctcgccgacgacacatccttcgggggaaacctcggaaaggcagtctttcaggccaagaaaagggttctcgaaccttttggcctggttgaagagggtgctaagacggcccctaccggaaagcggatagacgaccactttccaaaaagaaagaaggctcggaccgaagaggactccaagccttccacctcgtcagacgccgaagctggacccagcggatcccagcagctgcaaatcccagcccaaccagcctcaagtttgggagctgatacaatgtctgcgggaggtggcggcccattgggcgacaataaccaaggtgccgatggagtgggcaatgcctcgggagattggcattgcgattccacgtggatgggggacagagtcgtcaccaagtccacccgaacctgggtgctgcccagctacaacaaccaccagtaccgagagatcaaaagcggctccgtcgacggaagcaacgccaacgcctactttggatacagcaccccctgggggtactttgactttaaccgcttccacagccactggagcccccgagactggcaaagactcatcaacaactactggggcttcagaccccggtccctcagagtcaaaatcttcaacattcaagtcaaagaggtcacggtgcaggactccaccaccaccatcgccaacaacctcacctccaccgtccaagtgtttacggacgacgactaccagctgccctacgtcgtcggcaacgggaccgagggatgcctgccggccttccctccgcaggtctttacgctgccgcagtacggttacgcgacgctgaaccgcgacaacacagaaaatcccaccgagaggagcagcttcttctgcctagagtactttcccagcaagatgctgagaacgggcaacaactttgagtttacctacaactttgaggaggtgcccttccactccagcttcgctcccagtcagaacctgttcaagctggccaacccgctggtggaccagtacttgtaccgcttcgtgagcacaaataacactggcggagtccagttcaacaagaacctggccgggagatacgccaacacctacaaaaactggttcccggggcccatgggccgaacccagggctggaacctgggctccggggtcaaccgcgccagtgtcagcgccttcgccacgaccaataggatggagctcgagggcgcgagttaccaggtgcccccgcagccgaacggcatgaccaacaacctccagggcagcaacacctatgccctggagaacactatgatcttcaacagccagccggcgaacccgggcaccaccgccacgtacctcgagggcaacatgctcatcaccagcgagagcgagacgcagccggtgaaccgcgtggcgtacaacgtcggcgggcagatggccaccaacaaccagagctccaccactgcccccgcgaccggcacgtacaacacccaggaaatcgtgcccggcagcgtgtggatggagagggacgtgtacctccaaggacccatctgggccaagatcccagagacgggggcgcactttcacccctctccggccatgggcggattcggactcaaacacccaccgcccatgatgctcatcaagaacacgcctgtgcccggaaatatcaccagcttctcggacgtgcccgtcagcagcttcatcacccagtacagcaccgggcaggtcaccgtggagatggagtgggagctcaagaaggaaaactccaagaggtggaacccagagatccagtacacaaacaactacaacgacccccagtttgtggactttgccccggacagcaccggggaatacagaaccaccagacctatcggaacccgataccttacccgacccctttaacccattcatgtcgcataccctcaataaa

SEQ ID NO: 1173 - protein, 724 aa, Artificial Sequence
  source: /note="Description of Artificial Sequence: Synthetic polypeptide"
MSFVDHPPDWLEEVGEGLREFLGLEAGPPKPKPNQQHQDQARGLVLPGYNYLGPGNGLDRGEPVNRADEVAREHDISYNEQLEAGDNPYLKYNHADAEFQEKLADDTSFGGNLGKAVFQAKKRVLEPFGLVEEGAKTAPTGKRIDDHFPKRKKARTEEDSKPSTSSDAEAGPSGSQQLQIPAQPASSLGADTMSAGGGGPLGDNNQGADGVGNASGDWHCDSTWMGDRVVTKSTRTWVLPSYNNHQYREIKSGSVDGSNANAYFGYSTPWGYFDFNRFHSHWSPRDWQRLINNYWGFRPRSLRVKIFNIQVKEVTVQDSTTTIANNLTSTVQVFTDDDYQLPYVVGNGTEGCLPAFPPQVFTLPQYGYATLNRDNTENPTERSSFFCLEYFPSKMLRTGNNFEFTYNFEEVPFHSSFAPSQNLFKLANPLVDQYLYRFVSTNNTGGVQFNKNLAGRYANTYKNWFPGPMGRTQGWNLGSGVNRASVSAFATTNRMELEGASYQVPPQPNGMTNNLQGSNTYALENTMIFNSQPANPGTTATYLEGNMLITSESETQPVNRVAYNVGGQMATNNQSSTTAPATGTYNTQEIVPGSVWMERDVYLQGPIWAKIPETGAHFHPSPAMGGFGLKHPPPMMLIKNTPVPGNITSFSDVPVSSFITQYSTGQVTVEMEWELKKENSKRWNPEIQYTNNYNDPQFVDFAPDSTGEYRTTRPIGTRYLTRPL

SEQ ID NO: 1174 - DNA, 2203 bp, Artificial Sequence
  source: /note="Description of Artificial Sequence: Synthetic polynucleotide"
atgtcttttgttgatcaccctccagattggttggaagaagttggtgaaggtcttcgcgagtttttgggccttgaagcgggcccaccgaaaccaaaacccaatcagcagcatcaagatcaagcccgtggtcttgtgctgcctggttataactatctcggacccggaaacggtctcgatcgaggagagcctgtcaacagggcagacgaggtcgcgcgagagcacgacatctcgtacaacgagcagcttgaggcgggagacaacccctacctcaagtacaaccacgcggacgccgagtttcaggagaagctcgccgacgacacatccttcgggggaaacctcggaaaggcagtctttcaggccaagaaaagggttctcgaaccttttggcctggttgaagagggtgctaagacggcccctaccggaaagcggatagacgaccactttccaaaaagaaagaaggctcggaccgaagaggactccaagccttccacctcgtcagacgccgaagctggacccagcggatcccagcagctgcaaatcccagcccaaccagcctcaagtttgggagctgatacaatgtctgcgggaggtggcggcccattgggcgacaataaccaaggtgccgatggagtgggcaatgcctcgggagattggcattgcgattccacgtggatgggggacagagtcgtcaccaagtccacccgaacctgggtgctgcccagctacaacaaccaccagtaccgagagatcaaaagcggctccgtcgacggaagcaacgccaacgcctactttggatacagcaccccctgggggtactttgactttaaccgcttccacagccactggagcccccgagactggcaaagactcatcaacaactactggggcttcagaccccggtccctcagagtcaaaatcttcaacattcaagtcaaagaggtcacggtgcaggactccaccaccaccatcgccaacaacctcacctccaccgtccaagtgtttacggacgacgactaccagctgccctacgtcgtcggcaacgggaccgagggatgcctgccggccttccctccgcaggtctttacgctgccgcagtacggttacgcgacgctgaaccgcgacaacacagaaaatcccaccgagaggagcagcttcttctgcctagagtactttcccagcaagatgctgagaacgggcaacaactttgagtttacctacaactttgaggaggtgcccttccactccagcttcgctcccagtcagaacctgttcaagctggccaacccgctggtggaccagtacttgtaccgcttcgtgagcacaaataacactggcggagtccagttcaacaagaacctggccgggagatacgccaacacctacaaaaactggttcccggggcccatgggccgaacccagggctggaacctgggctccggggtcaaccgcgccagtgtcagcgccttcgccacgaccaataggatggagctcgagggcgcgagttaccaggtgcccccgcagccgaacggcatgaccaacaacctccagggcagcaacacctatgccctggagaacactatgatcttcaacagccagccggcgaacccgggcaccaccgccacgtacctcgagggcaacatgctcatcaccagcgagagcgagacgcagccggtgaaccgcgtggcgtacaacgtcggcgggcagatggccaccaacaaccagagctccaccactgcccccgcgaccggcacggtcaacacccaggaaatcgtgcccggcagcgtgtggatggagagggacgtgtacctccaaggacccatctgggccaagatcccagagacgggggcgcactttcacccctctccggccatgggcggattcggactcaaacacccaccgcccatgatgctcatcaagaacacgcctgtgcccggaaatatcaccagcttctcggacgtgcccgtcagcagcttcatcacccagtacagcaccgggcaggtcaccgtggagatggagtgggagctcaagaaggaaaactccaagaggtggaacccagagatccagtacacaaacaactacaacgacccccagtttgtggactttgccccggacagcaccggggaatacagaaccaccagacctatcggaacccgataccttacccgacccctttaacccattcatgtcgcataccctcaataaa

SEQ ID NO: 1175 - protein, 724 aa, Artificial Sequence
  source: /note="Description of Artificial Sequence: Synthetic polypeptide"
MSFVDHPPDWLEEVGEGLREFLGLEAGPPKPKPNQQHQDQARGLVLPGYNYLGPGNGLDRGEPVNRADEVAREHDISYNEQLEAGDNPYLKYNHADAEFQEKLADDTSFGGNLGKAVFQAKKRVLEPFGLVEEGAKTAPTGKRIDDHFPKRKKARTEEDSKPSTSSDAEAGPSGSQQLQIPAQPASSLGADTMSAGGGGPLGDNNQGADGVGNASGDWHCDSTWMGDRVVTKSTRTWVLPSYNNHQYREIKSGSVDGSNANAYFGYSTPWGYFDFNRFHSHWSPRDWQRLINNYWGFRPRSLRVKIFNIQVKEVTVQDSTTTIANNLTSTVQVFTDDDYQLPYVVGNGTEGCLPAFPPQVFTLPQYGYATLNRDNTENPTERSSFFCLEYFPSKMLRTGNNFEFTYNFEEVPFHSSFAPSQNLFKLANPLVDQYLYRFVSTNNTGGVQFNKNLAGRYANTYKNWFPGPMGRTQGWNLGSGVNRASVSAFATTNRMELEGASYQVPPQPNGMTNNLQGSNTYALENTMIFNSQPANPGTTATYLEGNMLITSESETQPVNRVAYNVGGQMATNNQSSTTAPATGTVNTQEIVPGSVWMERDVYLQGPIWAKIPETGAHFHPSPAMGGFGLKHPPPMMLIKNTPVPGNITSFSDVPVSSFITQYSTGQVTVEMEWELKKENSKRWNPEIQYTNNYNDPQFVDFAPDSTGEYRTTRPIGTRYLTRPL

SEQ ID NO: 1176 - DNA, 2203 bp, Artificial Sequence
  source: /note="Description of Artificial Sequence: Synthetic polynucleotide"
atgtcttttgttgatcaccctccagattggttggaagaagttggtgaaggtcttcgcgagtttttgggccttgaagcgggcccaccgaaaccaaaacccaatcagcagcatcaagatcaagcccgtggtcttgtgctgcctggttataactatctcggacccggaaacggtctcgatcgaggagagcctgtcaacagggcagacgaggtcgcgcgagagcacgacatctcgtacaacgagcagcttgaggcgggagacaacccctacctcaagtacaaccacgcggacgccgagtttcaggagaagctcgccgacgacacatccttcgggggaaacctcggaaaggcagtctttcaggccaagaaaagggttctcgaaccttttggcctggttgaagagggtgctaagacggcccctaccggaaagcggatagacgaccactttccaaaaagaaagaaggctcggaccgaagaggactccaagccttccacctcgtcagacgccgaagctggacccagcggatcccagcagctgcaaatcccagcccaaccagcctcaagtttgggagctgatacaatgtctgcgggaggtggcggcccattgggcgacaataaccaaggtgccgatggagtgggcaatgcctcgggagattggcattgcgattccacgtggatgggggacagagtcgtcaccaagtccacccgaacctgggtgctgcccagctacaacaaccaccagtaccgagagatcaaaagcggctccgtcgacggaagcaacgccaacgcctactttggatacagcaccccctgggggtactttgactttaaccgcttccacagccactggagcccccgagactggcaaagactcatcaacaactactggggcttcagaccccggtccctcagagtcaaaatcttcaacattcaagtcaaagaggtcacggtgcaggactccaccaccaccatcgccaacaacctcacctccaccgtccaagtgtttacggacgacgactaccagctgccctacgtcgtcggcaacgggaccgagggatgcctgccggccttccctccgcaggtctttacgctgccgcagtacggttacgcgacgctgaaccgcgacaacacagaaaatcccaccgagaggagcagcttcttctgcctagagtactttcccagcaagatgctgagaacgggcaacaactttgagtttacctacaactttgaggaggtgcccttccactccagcttcgctcccagtcagaacctgttcaagctggccaacccgctggtggaccagtacttgtaccgcttcgtgagcacaaataacactggcggagtccagttcaacaagaacctggccgggagatacgccaacacctacaaaaactggttcccggggcccatgggccgaacccagggctggaacctgggctccggggtcaaccgcgccagtgtcagcgccttcgccacgaccaataggatggagctcgagggcgcgagttaccaggtgcccccgcagccgaacggcatgaccaacaacctccagggcagcaacacctatgccctggagaacactatgatcttcaacagccagccggcgaacccgggcaccaccgccacgtacctcgagggcaacatgctcatcaccagcgagagcgagacgcagccggtgaaccgcgtggcgtacaacgtcggcgggcagatggccaccaacaaccagagctccaccactgcccccgcgaccggcacgtacaacctccaggaaatcgtgcccggcagcgtgtggatggagagggacgtgtacctccaaggacccatctgggccaagatcccagagacgggggcgcactttcacccctctccggccatgggcggattcggactcaaacacccaccgcccatgatgctcatcaagaacacgcctgtgcccggaaatatcaccagcttctcggccgtgcccgtcagcagcttcatcacccagtacagcaccgggcaggtcaccgtggagatggagtgggagctcaagaaggaaaactccaagaggtggaacccagagatccagtacacaaacaactacaacgacccccagtttgtggactttgccccggacagcaccggggaatacagaaccaccagacctatcggaacccgataccttacccgacccctttaacccattcatgtcgcataccctcaataaa

SEQ ID NO: 1177 - protein, 724 aa, Artificial Sequence
  source: /note="Description of Artificial Sequence: Synthetic polypeptide"
MSFVDHPPDWLEEVGEGLREFLGLEAGPPKPKPNQQHQDQARGLVLPGYNYLGPGNGLDRGEPVNRADEVAREHDISYNEQLEAGDNPYLKYNHADAEFQEKLADDTSFGGNLGKAVFQAKKRVLEPFGLVEEGAKTAPTGKRIDDHFPKRKKARTEEDSKPSTSSDAEAGPSGSQQLQIPAQPASSLGADTMSAGGGGPLGDNNQGADGVGNASGDWHCDSTWMGDRVVTKSTRTWVLPSYNNHQYREIKSGSVDGSNANAYFGYSTPWGYFDFNRFHSHWSPRDWQRLINNYWGFRPRSLRVKIFNIQVKEVTVQDSTTTIANNLTSTVQVFTDDDYQLPYVVGNGTEGCLPAFPPQVFTLPQYGYATLNRDNTENPTERSSFFCLEYFPSKMLRTGNNFEFTYNFEEVPFHSSFAPSQNLFKLANPLVDQYLYRFVSTNNTGGVQFNKNLAGRYANTYKNWFPGPMGRTQGWNLGSGVNRASVSAFATTNRMELEGASYQVPPQPNGMTNNLQGSNTYALENTMIFNSQPANPGTTATYLEGNMLITSESETQPVNRVAYNVGGQMATNNQSSTTAPATGTYNLQEIVPGSVWMERDVYLQGPIWAKIPETGAHFHPSPAMGGFGLKHPPPMMLIKNTPVPGNITSFSAVPVSSFITQYSTGQVTVEMEWELKKENSKRWNPEIQYTNNYNDPQFVDFAPDSTGEYRTTRPIGTRYLTRPL

SEQ ID NO: 1178 - DNA, 2203 bp, Artificial Sequence
  source: /note="Description of Artificial Sequence: Synthetic polynucleotide"
atgtcttttgttgatcaccctccagattggttggaagaagttggtgaaggtcttcgcgagtttttgggccttgaagcgggcccaccgaaaccaaaacccaatcagcagcatcaagatcaagcccgtggtcttgtgctgcctggttataactatctcggacccggaaacggtctcgatcgaggagagcctgtcaacagggcagacgaggtcgcgcgagagcacgacatctcgtacaacgagcagcttgaggcgggagacaacccctacctcaagtacaaccacgcggacgccgagtttcaggagaagctcgccgacgacacatccttcgggggaaacctcggaaaggcagtctttcaggccaagaaaagggttctcgaaccttttggcctggttgaagagggtgctaagacggcccctaccggaaagcggatagacgaccactttccaaaaagaaagaaggctcggaccgaagaggactccaagccttccacctcgtcagacgccgaagctggacccagcggatcccagcagctgcaaatcccagcccaaccagcctcaagtttgggagctgatacaatgtctgcgggaggtggcggcccattgggcgacaataaccaaggtgccgatggagtgggcaatgcctcgggagattggcattgcgattccacgtggatgggggacagagtcgtcaccaagtccacccgaacctgggtgctgcccagctacaacaaccaccagtaccgagagatcaaaagcggctccgtcgacggaagcaacgccaacgcctactttggatacagcaccccctgggggtactttgactttaaccgcttccacagccactggagcccccgagactggcaaagactcatcaacaactactggggcttcagaccccggtccctcagagtcaaaatcttcaacattcaagtcaaagaggtcacggtgcaggactccaccaccaccatcgccaacaacctcacctccaccgtccaagtgtttatggacgacgactaccagctgccctacgtcgtcggcaacgggaccgagggatgcctgccggccttccctccgcaggtctttacgctgccgcagtacggttacgcgacgctgaaccgcgacaacacagaaaatcccaccgagaggagcagcttcttctgcctagagtactttcccagcaagatgctgagaacgggcaacaactttgagtttacctacaactttgaggaggtgcccttccactccagcttcgctcccagtcagaacctgttcaagctggccaacccgctggtggaccagtacttgtaccgcttcgtgagcacaaataacactggcggagtccagttcaacaagaacctggccgggagatacgccaacacctacaaaaactggttcccggggcccatgggccgaacccagggctggaacctgggctccggggtcaaccgcgccagtgtcagcgccttcgccacgaccaataggatggagctcgagggcgcgagttaccaggtgcccccgcagccgaacggcatgaccaacaacctccagggcagcaacacctatgccctggagaacactatgatcttcaacagccagccggcgaacccgggcaccaccgccacgtacctcgagggcaacatgctcatcaccagcgagagcgagacgcagccggtgaaccgcgtggcgtacaacgtcggcgggcagatggccaccaacaaccagagctccaccactgcccccgcgaccggcacgtacaacctccaggaaatcgtgcccggcagcgtgtggatggagagggacgtgtacctccaaggacccatctgggccaagatcccagagacgggggcgcactttcacccctctccggccatgggcggattcggactcaaacacccaccgcccatgatgctcatcaagaacacgcctgtgcccggaaatatcaccagcttctcggacgtgcccgtcagcagcttcatcacccagtacagcaccgggcaggtcaccgtggagatggagtgggagctcaagaaggaaaactccaagaggtggaacccagagatccagtacacaaacaactacaacgacccccagtttgtggactttgccccggacagcaccggggaatacagaaccaccagacctatcggaacccgataccttacccgacccctttaacccattcatgtcgcataccctcaataaa

SEQ ID NO: 1179 - protein, 724 aa, Artificial Sequence
  source: /note="Description of Artificial Sequence: Synthetic polypeptide"
MSFVDHPPDWLEEVGEGLREFLGLEAGPPKPKPNQQHQDQARGLVLPGYNYLGPGNGLDRGEPVNRADEVAREHDISYNEQLEAGDNPYLKYNHADAEFQEKLADDTSFGGNLGKAVFQAKKRVLEPFGLVEEGAKTAPTGKRIDDHFPKRKKARTEEDSKPSTSSDAEAGPSGSQQLQIPAQPASSLGADTMSAGGGGPLGDNNQGADGVGNASGDWHCDSTWMGDRVVTKSTRTWVLPSYNNHQYREIKSGSVDGSNANAYFGYSTPWGYFDFNRFHSHWSPRDWQRLINNYWGFRPRSLRVKIFNIQVKEVTVQDSTTTIANNLTSTVQVFMDDDYQLPYVVGNGTEGCLPAFPPQVFTLPQYGYATLNRDNTENPTERSSFFCLEYFPSKMLRTGNNFEFTYNFEEVPFHSSFAPSQNLFKLANPLVDQYLYRFVSTNNTGGVQFNKNLAGRYANTYKNWFPGPMGRTQGWNLGSGVNRASVSAFATTNRMELEGASYQVPPQPNGMTNNLQGSNTYALENTMIFNSQPANPGTTATYLEGNMLITSESETQPVNRVAYNVGGQMATNNQSSTTAPATGTYNLQEIVPGSVWMERDVYLQGPIWAKIPETGAHFHPSPAMGGFGLKHPPPMMLIKNTPVPGNITSFSDVPVSSFITQYSTGQVTVEMEWELKKENSKRWNPEIQYTNNYNDPQFVDFAPDSTGEYRTTRPIGTRYLTRPL

SEQ ID NO: 1180 - DNA, 2203 bp, Artificial Sequence
  source: /note="Description of Artificial Sequence: Synthetic polynucleotide"
atgtcttttgttgatcaccctccagattggttggaagaagttggtgaaggtcttcgcgagtttttgggccttgaagcgggcccaccgaaaccaaaacccaatcagcagcatcaagatcaagcccgtggtcttgtgctgcctggttataactatctcggacccggaaacggtctcgatcgaggagagcctgtcaacagggcagacgaggtcgcgcgagagcacgacatctcgtacaacgagcagcttgaggcgggagacaacccctacctcaagtacaaccacgcggacgccgagtttcaggagaagctcgccgacgacacatccttcgggggaaacctcggaaaggcagtctttcaggccaagaaaagggttctcgaaccttttggcctggttgaagagggtgctaagacggcccctaccggaaagcggatagacgaccactttccaaaaagaaagaaggctcggaccgaagaggactccaagccttccacctcgtcagacgccgaagctggacccagcggatcccagcagctgcaaatcccagcccaaccagcctcaagtttgggagctgatacaatgtctgcgggaggtggcggcccattgggcgacaataaccaaggtgccgatggagtgggcaatgcctcgggagattggcattgcgattccacgtggatgggggacagagtcgtcaccaagtccacccgaacctgggtgctgcccagctacaacaaccaccagtaccgagagatcaaaagcggctccgtcgacggaagcaacgccaacgcctactttggatacagcaccccctgggggtactttgactttaaccgcttccacagccactggagcccccgagactggcaaagactcatcaacaactactggggcttcagaccccggtccctcagagtcaaaatcttcaacattcaagtcaaagaggtcacggtgcaggactccaccaccaccatcgccaacaacctcacctccaccgtcgatgtgtttacggacgacgactaccagctgccctacgtcgtcggcaacgggaccgagggatgcctgccggccttccctccgcaggtctttacgctgccgcagtacggttacgcgacgctgaaccgcgacaacacagaaaatcccaccgagaggagcagcttcttctgcctagagtactttcccagcaagatgctgagaacgggcaacaactttgagtttacctacaactttgaggaggtgcccttccactccagcttcgctcccagtcagaacctgttcaagctggccaacccgctggtggaccagtacttgtaccgcttcgtgagcacaaataacactggcggagtccagttcaacaagaacctggccgggagatacgccaacacctacaaaaactggttcccggggcccatgggccgaacccagggctggaacctgggctccggggtcaaccgcgccagtgtcagcgccttcgccacgaccaataggatggagctcgagggcgcgagttaccaggtgcccccgcagccgaacggcatgaccaacaacctccagggcagcaacacctatgccctggagaacactatgatcttcaacagccagccggcgaacccgggcaccaccgccacgtacctcgagggcaacatgctcatcaccagcgagagcgagacgcagccggtgaaccgcgtggcgtacaacgtcggcgggcagatggccaccaacaaccagagctccaccactgcccccgcgaccggcacgtacaacctccaggaaatcgtgcccggcagcgtgtggatggagagggacgtgtacctccaaggacccatctgggccaagatcccagagacgggggcgcactttcacccctctccggccatgggcggattcggactcaaacacccaccgcccatgatgctcatcaagaacacgcctgtgcccggaaatatcaccagcttctcggacgtgcccgtcagcagcttcatcacccagtacagcaccgggcaggtcaccgtggagatggagtgggagctcaagaaggaaaactccaagaggtggaacccagagatccagtacacaaacaactacaacgacccccagtttgtggactttgccccggacagcaccggggaatacagaaccaccagacctatcggaacccgataccttacccgacccctttaacccattcatgtcgcataccctcaataaa

SEQ ID NO: 1181 - protein, 724 aa, Artificial Sequence
  source: /note="Description of Artificial Sequence: Synthetic polypeptide"
MSFVDHPPDWLEEVGEGLREFLGLEAGPPKPKPNQQHQDQARGLVLPGYNYLGPGNGLDRGEPVNRADEVAREHDISYNEQLEAGDNPYLKYNHADAEFQEKLADDTSFGGNLGKAVFQAKKRVLEPFGLVEEGAKTAPTGKRIDDHFPKRKKARTEEDSKPSTSSDAEAGPSGSQQLQIPAQPASSLGADTMSAGGGGPLGDNNQGADGVGNASGDWHCDSTWMGDRVVTKSTRTWVLPSYNNHQYREIKSGSVDGSNANAYFGYSTPWGYFDFNRFHSHWSPRDWQRLINNYWGFRPRSLRVKIFNIQVKEVTVQDSTTTIANNLTSTVDVFTDDDYQLPYVVGNGTEGCLPAFPPQVFTLPQYGYATLNRDNTENPTERSSFFCLEYFPSKMLRTGNNFEFTYNFEEVPFHSSFAPSQNLFKLANPLVDQYLYRFVSTNNTGGVQFNKNLAGRYANTYKNWFPGPMGRTQGWNLGSGVNRASVSAFATTNRMELEGASYQVPPQPNGMTNNLQGSNTYALENTMIFNSQPANPGTTATYLEGNMLITSESETQPVNRVAYNVGGQMATNNQSSTTAPATGTYNLQEIVPGSVWMERDVYLQGPIWAKIPETGAHFHPSPAMGGFGLKHPPPMMLIKNTPVPGNITSFSDVPVSSFITQYSTGQVTVEMEWELKKENSKRWNPEIQYTNNYNDPQFVDFAPDSTGEYRTTRPIGTRYLTRPL

SEQ ID NO: 1182 - DNA, 2203 bp, Artificial Sequence
  source: /note="Description of Artificial Sequence: Synthetic polynucleotide"
atgtcttttgttgatcaccctccagattggttggaagaagttggtgaaggtcttcgcgagtttttgggccttgaagcgggcccaccgaaaccaaaacccaatcagcagcatcaagatcaagcccgtggtcttgtgctgcctggttataactatctcggacccggaaacggtctcgatcgaggagagcctgtcaacagggcagacgaggtcgcgcgagagcacgacatctcgtacaacgagcagcttgaggcgggagacaacccctacctcaagtacaaccacgcggacgccgagtttcaggagaagctcgccgacgacacatccttcgggggaaacctcggaaaggcagtctttcaggccaagaaaagggttctcgaaccttttggcctggttgaagagggtgctaagacggcccctaccggaaagcggatagacgaccactttccaaaaagaaagaaggctcggaccgaagaggactccaagccttccacctcgtcagacgccgaagctggacccagcggatcccagcagctgcaaatcccagcccaaccagcctcaagtttgggagctgatacaatgtctgcgggaggtggcggcccattgggcgacaataaccaaggtgccgatggagtgggcaatgcctcgggagattggcattgcgattccacgtggatgggggacagagtcgtcaccaagtccacccgaacctgggtgctgcccagctacaacaaccaccagtaccgagagatcaaaagcggctccgtcgacggaagcaacgccaacgcctactttggatacagcaccccctgggggtactttgactttaaccgcttccacagccactggagcccccgagactggcaaagactcatcaacaactactggggcttcagaccccggtccctcagagtcaaaatcttcaacattcaagtcaaagaggtcacggtgcaggactccaccaccaccatcgccaacaacctcacctccaccgtccaagtgtttacggacgacgactaccagctgccctacgtcgtcggcaacgggacccagggatgcctgccggccttccctccgcaggtctttacgctgccgcagtacggttacgcgacgctgaaccgcgacaacacagaaaatcccaccgagaggagcagcttcttctgcctagagtactttcccagcaagatgctgagaacgggcaacaactttgagtttacctacaactttgaggaggtgcccttccactccagcttcgctcccagtcagaacctgttcaagctggccaacccgctggtggaccagtacttgtaccgcttcgtgagcacaaataacactggcggagtccagttcaacaagaacctggccgggagatacgccaacacctacaaaaactggttcccggggcccatgggccgaacccagggctggaacctgggctccggggtcaaccgcgccagtgtcagcgccttcgccacgaccaataggatggagctcgagggcgcgagttaccaggtgcccccgcagccgaacggcatgaccaacaacctccagggcagcaacacctatgccctggagaacactatgatcttcaacagccagccggcgaacccgggcaccaccgccacgtacctcgagggcaacatgctcatcaccagcgagagcgagacgcagccggtgaaccgcgtggcgtacaacgtcggcgggcagatggccaccaacaaccagagctccaccactgcccccgcgaccggcacgtacaacctccaggaaatcgtgcccggcagcgtgtggatggagagggacgtgtacctccaaggacccatctgggccaagatcccagagacgggggcgcactttcacccctctccggccatgggcggattcggactcaaacacccaccgcccatgatgctcatcaagaacacgcctgtgcccggaaatatcaccagcttctcggacgtgcccgtcagcagcttcatcacccagtacagcaccgggcaggtcaccgtggagatggagtgggagctcaagaaggaaaactccaagaggtggaacccagagatccagtacacaaacaactacaacgacccccagtttgtggactttgccccggacagcaccggggaatacagaaccaccagacctatcggaacccgataccttacccgacccctttaacccattcatgtcgcataccctcaataaa

SEQ ID NO: 1183 - protein, 724 aa, Artificial Sequence
  source: /note="Description of Artificial Sequence: Synthetic polypeptide"
MSFVDHPPDWLEEVGEGLREFLGLEAGPPKPKPNQQHQDQARGLVLPGYNYLGPGNGLDRGEPVNRADEVAREHDISYNEQLEAGDNPYLKYNHADAEFQEKLADDTSFGGNLGKAVFQAKKRVLEPFGLVEEGAKTAPTGKRIDDHFPKRKKARTEEDSKPSTSSDAEAGPSGSQQLQIPAQPASSLGADTMSAGGGGPLGDNNQGADGVGNASGDWHCDSTWMGDRVVTKSTRTWVLPSYNNHQYREIKSGSVDGSNANAYFGYSTPWGYFDFNRFHSHWSPRDWQRLINNYWGFRPRSLRVKIFNIQVKEVTVQDSTTTIANNLTSTVQVFTDDDYQLPYVVGNGTQGCLPAFPPQVFTLPQYGYATLNRDNTENPTERSSFFCLEYFPSKMLRTGNNFEFTYNFEEVPFHSSFAPSQNLFKLANPLVDQYLYRFVSTNNTGGVQFNKNLAGRYANTYKNWFPGPMGRTQGWNLGSGVNRASVSAFATTNRMELEGASYQVPPQPNGMTNNLQGSNTYALENTMIFNSQPANPGTTATYLEGNMLITSESETQPVNRVAYNVGGQMATNNQSSTTAPATGTYNLQEIVPGSVWMERDVYLQGPIWAKIPETGAHFHPSPAMGGFGLKHPPPMMLIKNTPVPGNITSFSDVPVSSFITQYSTGQVTVEMEWELKKENSKRWNPEIQYTNNYNDPQFVDFAPDSTGEYRTTRPIGTRYLTRPL

SEQ ID NO: 1184 - DNA, 2203 bp, Artificial Sequence
  source: /note="Description of Artificial Sequence: Synthetic polynucleotide"
atgtcttttgttgatcaccctccagattggttggaagaagttggtgaaggtcttcgcgagtttttgggccttgaagcgggcccaccgaaaccaaaacccaatcagcagcatcaagatcaagcccgtggtcttgtgctgcctggttataactatctcggacccggaaacggtctcgatcgaggagagcctgtcaacagggcagacgaggtcgcgcgagagcacgacatctcgtacaacgagcagcttgaggcgggagacaacccctacctcaagtacaaccacgcggacgccgagtttcaggagaagctcgccgacgacacatccttcgggggaaacctcggaaaggcagtctttcaggccaagaaaagggttctcgaaccttttggcctggttgaagagggtgctaagacggcccctaccggaaagcggatagacgaccactttccaaaaagaaagaaggctcggaccgaagaggactccaagccttccacctcgtcagacgccgaagctggacccagcggatcccagcagctgcaaatcccagcccaaccagcctcaagtttgggagctgatacaatgtctgcgggaggtggcggcccattgggcgacaataaccaaggtgccgatggagtgggcaatgcctcgggagattggcattgcgattccacgtggatgggggacagagtcgtcaccaagtccacccgaacctgggtgctgcccagctacaacaaccaccagtaccgagagatcaaaagcggctccgtcgacggaagcaacgccaacgcctactttggatacagcaccccctgggggtactttgactttaaccgcttccacagccactggagcccccgagactggcaaagactcatcaacaactactggggcttcagaccccggtccctcagagtcaaaatcttcaacattcaagtcaaagaggtcacggtgcaggactccaccaccaccatcgccaacaacctcacctccaccgtccaagtgtttacggacgacgactaccagctgccctacgtcgtcggcaacgggaccgagggatgcctgccggccttccctccgcaggtctttacgctgccgcagtacggttacgcgacgctgaaccgcgacaacacagaaaatcccaccgagaggagcagcttcttctgcctagagtactttcccagcaagatgctgagaacgggcaacaactttgagtttacctacaactttgaggaggtgcccttccactccagcttcgctcccagtcagaacctgttcaagctggccaacccgctggtggaccagtacttgtaccgcttcgtgagcacaaataacactggcggagtccagttcaacaagaacctggccgggagatacgccaacacctacaaaaactggttcccggggcccatgggccgaacccagggctggaacctgggctccggggtcaaccgcgccagtgtcagcgccttcgccacgaccaataggatggagctcgagggcgcgagttaccaggtgcccccgcagccgaacggcatgaccaacaacctccagggcagcaacacctatgccctggagaacactatgatcttcaacagccagtcggcgaacccgggcaccaccgccacgtacctcgagggcaacatgctcatcaccagcgagagcgagacgcagccggtgaaccgcgtggcgtacaacgtcggcgggcagatggccaccaacaaccagagctccaccactgcccccgcgaccggcacgtacaacctccaggaaatcgtgcccggcagcgtgtggatggagagggacgtgtacctccaaggacccatctgggccaagatcccagagacgggggcgcactttcacccctctccggccatgggcggattcggactcaaacacccaccgcccatgatgctcatcaagaacacgcctgtgcccggaaatatcaccagcttctcggacgtgcccgtcagcagcttcatcacccagtacagcaccgggcaggtcaccgtggagatggagtgggagctcaagaaggaaaactccaagaggtggaacccagagatccagtacacaaacaactacaacgacccccagtttgtggactttgccccggacagcaccggggaatacagaaccaccagacctatcggaacccgataccttacccgacccctttaacccattcatgtcgcataccctcaataaa

SEQ ID NO: 1185 - protein, 724 aa, Artificial Sequence
  source: /note="Description of Artificial Sequence: Synthetic polypeptide"
MSFVDHPPDWLEEVGEGLREFLGLEAGPPKPKPNQQHQDQARGLVLPGYNYLGPGNGLDRGEPVNRADEVAREHDISYNEQLEAGDNPYLKYNHADAEFQEKLADDTSFGGNLGKAVFQAKKRVLEPFGLVEEGAKTAPTGKRIDDHFPKRKKARTEEDSKPSTSSDAEAGPSGSQQLQIPAQPASSLGADTMSAGGGGPLGDNNQGADGVGNASGDWHCDSTWMGDRVVTKSTRTWVLPSYNNHQYREIKSGSVDGSNANAYFGYSTPWGYFDFNRFHSHWSPRDWQRLINNYWGFRPRSLRVKIFNIQVKEVTVQDSTTTIANNLTSTVQVFTDDDYQLPYVVGNGTEGCLPAFPPQVFTLPQYGYATLNRDNTENPTERSSFFCLEYFPSKMLRTGNNFEFTYNFEEVPFHSSFAPSQNLFKLANPLVDQYLYRFVSTNNTGGVQFNKNLAGRYANTYKNWFPGPMGRTQGWNLGSGVNRASVSAFATTNRMELEGASYQVPPQPNGMTNNLQGSNTYALENTMIFNSQSANPGTTATYLEGNMLITSESETQPVNRVAYNVGGQMATNNQSSTTAPATGTYNLQEIVPGSVWMERDVYLQGPIWAKIPETGAHFHPSPAMGGFGLKHPPPMMLIKNTPVPGNITSFSDVPVSSFITQYSTGQVTVEMEWELKKENSKRWNPEIQYTNNYNDPQFVDFAPDSTGEYRTTRPIGTRYLTRPL

SEQ ID NO: 1186 - DNA, 2203 bp, Artificial Sequence
  source: /note="Description of Artificial Sequence: Synthetic polynucleotide"
atgtcttttgttgatcaccctccagattggttggaagaagttggtgaaggtcttcgcgagtttttgggccttgaagcgggcccaccgaaaccaaaacccaatcagcagcatcaagatcaagcccgtggtcttgtgctgcctggttataactatctcggacccggaaacggtctcgatcgaggagagcctgtcaacagggcagacgaggtcgcgcgagagcacgacatctcgtacaacgagcagcttgaggcgggagacaacccctacctcaagtacaaccacgcggacgccgagtttcaggagaagctcgccgacgacacatccttcgggggaaacctcggaaaggcagtctttcaggccaagaaaagggttctcgaaccttttggcctggttgaagagggtgctaagacggcccctaccggaaagcggatagacgaccactttccaaaaagaaagaaggctcggaccgaagaggactccaagccttccacctcgtcagacgccgaagctggacccagcggatcccagcagctgcaaatcccagcccaaccagcctcaagtttgggagctgatacaatgtctgcgggaggtggcggcccattgggcgacaataaccaaggtgccgatggagtgggcaatgcctcgggagattggcattgcgattccacgtggatgggggacagagtcgtcaccaagtccacccgaacctgggtgctgcccagctacaacaaccaccagtaccgagagatcaaaagcggctccgtcgacggaagcaacgccaacgcctactttggatacagcaccccctgggggtactttgactttaaccgcttccacagccactggagcccccgagactggcaaagactcatcaacaactactggggcttcagaccccggtccctcagagtcaaaatcttcaacattcaagtcaaagaggtcacggtgcaggactccaccaccaccatcgccaacaacctcacctccaccgtccaagtgtttacggacgacgactaccagctgccctacgtcgtcggcaacgggaccgagggatgcctgccggccttccctccgcaggtctttacgctgccgcagtacggttacgcgacgctgaaccgcgacaacacagaaaatcccaccgagaggagcagcttcttctgcctagagtactttcccagcaagatgctgagaacgggcaacaactttgagtttacctacaactttgaggaggtgcccttccactccagcttcgctcccagtcagaacctgttcaagctggccaacccgctggtggaccagtacttgtaccgcttcgtgagcacaaataacactggcggagtccagttcaacaagaacctggccgggagatacgccaacacctacaaaaactggttcccggggcccatgggccgaacccagggctggaacctgggctccggggtcaaccgcgccagtgtcagcgccttcgccacgaccaataggatggagctcgagggcgcgagttaccaggtgcccccgcagccgaacggcatgaccaacaacctccagggcagcaacacctatgccctggagaacactatgatcttcaacagccagggggcgaacccgggcaccaccgccacgtacctcgagggcaacatgctcatcaccagcgagagcgagacgcagccggtgaaccgcgtggcgtacaacgtcggcgggcagatggccaccaacaaccagagctccaccactgcccccgcgaccggcacgtacaacctccaggaaatcgtgcccggcagcgtgtggatggagagggacgtgtacctccaaggacccatctgggccaagatcccagagacgggggcgcactttcacccctctccggccatgggcggattcggactcaaacacccaccgcccatgatgctcatcaagaacacgcctgtgcccggaaatatcaccagcttctcggacgtgcccgtcagcagcttcatcacccagtacagcaccgggcaggtcaccgtggagatggagtgggagctcaagaaggaaaactccaagaggtggaacccagagatccagtacacaaacaactacaacgacccccagtttgtggactttgccccggacagcaccggggaatacagaaccaccagacctatcggaacccgataccttacccgacccctttaacccattcatgtcgcataccctcaataaa

SEQ ID NO: 1187 - protein, 724 aa, Artificial Sequence
  source: /note="Description of Artificial Sequence: Synthetic polypeptide"
MSFVDHPPDWLEEVGEGLREFLGLEAGPPKPKPNQQHQDQARGLVLPGYNYLGPGNGLDRGEPVNRADEVAREHDISYNEQLEAGDNPYLKYNHADAEFQEKLADDTSFGGNLGKAVFQAKKRVLEPFGLVEEGAKTAPTGKRIDDHFPKRKKARTEEDSKPSTSSDAEAGPSGSQQLQIPAQPASSLGADTMSAGGGGPLGDNNQGADGVGNASGDWHCDSTWMGDRVVTKSTRTWVLPSYNNHQYREIKSGSVDGSNANAYFGYSTPWGYFDFNRFHSHWSPRDWQRLINNYWGFRPRSLRVKIFNIQVKEVTVQDSTTTIANNLTSTVQVFTDDDYQLPYVVGNGTEGCLPAFPPQVFTLPQYGYATLNRDNTENPTERSSFFCLEYFPSKMLRTGNNFEFTYNFEEVPFHSSFAPSQNLFKLANPLVDQYLYRFVSTNNTGGVQFNKNLAGRYANTYKNWFPGPMGRTQGWNLGSGVNRASVSAFATTNRMELEGASYQVPPQPNGMTNNLQGSNTYALENTMIFNSQGANPGTTATYLEGNMLITSESETQPVNRVAYNVGGQMATNNQSSTTAPATGTYNLQEIVPGSVWMERDVYLQGPIWAKIPETGAHFHPSPAMGGFGLKHPPPMMLIKNTPVPGNITSFSDVPVSSFITQYSTGQVTVEMEWELKKENSKRWNPEIQYTNNYNDPQFVDFAPDSTGEYRTTRPIGTRYLTRPL

SEQ ID NO: 1188 - DNA, 2194 bp, Artificial Sequence
  source: /note="Description of Artificial Sequence: Synthetic polynucleotide"
atgtcttttgttgatcaccctccagattggttggaagaagttggtgaaggtcttcgcgagtttttgggccttgaagcgggcccaccgaaaccaaaacccaatcagcagcatcaagatcaagcccgtggtcttgtgctgcctggttataactatctcggacccggaaacggtctcgatcgaggagagcctgtcaacagggcagacgaggtcgcgcgagagcacgacatctcgtacaacgagcagcttgaggcgggagacaacccctacctcaagtacaaccacgcggacgccgagtttcaggagaagctcgccgacgacacatccttcgggggaaacctcggaaaggcagtctttcaggccaagaaaagggttctcgaaccttttggcctggttgaagagggtgctaagacggcccctaccggaaagcggatagacgaccactttccaaaaagaaagaaggctcggaccgaagaggactccaagccttccacctcgtcagacgccgaagctggacccagcggatcccagcagctgcaaatcccagcccaaccagcctcaagtttgggagctgatacaatgtctgcgggaggtggcggcccattgggcgacaataaccaaggtgccgatggagtgggcaatgcctcgggagattggcattgcgattccacgtggatgggggacagagtcgtcaccaagtccacccgaacctgggtgctgcccagctacaacaaccaccagtaccgagagatcaaaagcggctccgtcgacggaagcaacgccaacgcctactttggatacagcaccccctgggggtactttgactttaaccgcttccacagccactggagcccccgagactggcaaagactcatcaacaactactggggcttcagaccccggtccctcagagtcaaaatcttcaacattcaagtcaaagaggtcacggtgcaggactccaccaccaccatcgccaacaacctcacctccaccgtccaagtgtttacggacgacgactaccagctgccctacgtcgtcggcaacgggaccgagggatgcctgccggccttccctccgcaggtctttacgctgccgcagtacggttacgcgacgctgaaccgcgacaacacagaaaatcccaccgagaggagcagcttcttctgcctagagtactttcccagcaagatgctgagaacgggcaacaactttgagtttacctacaactttgaggaggtgcccttccactccagcttcgctcccagtcagaacctgttcaagctggccaacccgctggtggaccagtacttgtaccgcttcgtgagcacaaataacactggcggagtccagttcaacaagaacctggccgggagatacgccaacacctacaaaaactggttcccggggcccatgggccgaacccagggctggaacctgggctccggggtcaaccgcgccagtgtcagcgccttcgccacgaccaataggatggagctcgagggcgcgagttaccaggtgcccccgcagccgaacggcatgaccaacaacctccagggcagcaacacctatgccctggagaacactatgatcttcgggaagcaaggctcagagaaaacaaatgtggacattgaaaaggtcatgatcaccagcgagagcgagacgcagccggtgaaccgcgtggcgtacaacgtcggcgggcagatggccaccaacaaccagagctccaccactgcccccgcgaccggcacgtacaacctccaggaaatcgtgcccggcagcgtgtggatggagagggacgtgtacctccaaggacccatctgggccaagatcccagagacgggggcgcactttcacccctctccggccatgggcggattcggactcaaacacccaccgcccatgatgctcatcaagaacacgcctgtgcccggaaatatcaccagcttctcggacgtgcccgtcagcagcttcatcacccagtacagcaccgggcaggtcaccgtggagatggagtgggagctcaagaaggaaaactccaagaggtggaacccagagatccagtacacaaacaactacaacgacccccagtttgtggactttgccccggacagcaccggggaatacagaaccaccagacctatcggaacccgataccttacccgacccctttaacccattcatgtcgcataccctcaataaa

SEQ ID NO: 1189 - protein, 721 aa, Artificial Sequence
  source: /note="Description of Artificial Sequence: Synthetic polypeptide"
MSFVDHPPDWLEEVGEGLREFLGLEAGPPKPKPNQQHQDQARGLVLPGYNYLGPGNGLDRGEPVNRADEVAREHDISYNEQLEAGDNPYLKYNHADAEFQEKLADDTSFGGNLGKAVFQAKKRVLEPFGLVEEGAKTAPTGKRIDDHFPKRKKARTEEDSKPSTSSDAEAGPSGSQQLQIPAQPASSLGADTMSAGGGGPLGDNNQGADGVGNASGDWHCDSTWMGDRVVTKSTRTWVLPSYNNHQYREIKSGSVDGSNANAYFGYSTPWGYFDFNRFHSHWSPRDWQRLINNYWGFRPRSLRVKIFNIQVKEVTVQDSTTTIANNLTSTVQVFTDDDYQLPYVVGNGTEGCLPAFPPQVFTLPQYGYATLNRDNTENPTERSSFFCLEYFPSKMLRTGNNFEFTYNFEEVPFHSSFAPSQNLFKLANPLVDQYLYRFVSTNNTGGVQFNKNLAGRYANTYKNWFPGPMGRTQGWNLGSGVNRASVSAFATTNRMELEGASYQVPPQPNGMTNNLQGSNTYALENTMIFGKQGSEKTNVDIEKVMITSESETQPVNRVAYNVGGQMATNNQSSTTAPATGTYNLQEIVPGSVWMERDVYLQGPIWAKIPETGAHFHPSPAMGGFGLKHPPPMMLIKNTPVPGNITSFSDVPVSSFITQYSTGQVTVEMEWELKKENSKRWNPEIQYTNNYNDPQFVDFAPDSTGEYRTTRPIGTRYLTRPL

SEQ ID NO: 1190 - protein, 519 aa, Artificial Sequence
  source: /note="Description of Artificial Sequence: Synthetic polypeptide"
DGVGSSSGNWHCDSTWLGDRVITTSTRTWALPTYNNHLYKQISNGTSGGATNDNTYFGYSTPWGYFDFNRFHCHFSPRDWQRLINNNWGFRPKRLSFKLFNIQVKEVTQNEGTKTIANNLTSTIQVFTDSEYQLPYVLGSAHQGCLPPFPADVFMIPQYGYLTLNNGSQAVGRSSFYCLEYFPSQMLRTGNNFQFTYTFEDVPFHSSYAHSQSLDRLMNPLIDQYLYYLSRTQTTGGTANTQTLGFSQGGPNTMANQAKNWLPGPCYRQQRVSTTTGQNNNSNFAWTAGTKYHLNGRNSLANPGIAMATHKDDEERFFPSNGILIFGKQNAARDNADYSDVMLTSEEEIKTTNPVATEEYGIVADNLQQQNTAPQIGTVNSQGALPGMVWQNRDVYLQGPIWAKIPHTDGNFHPSPLMGGFGLKHPPPQILIKNTPVPADPPTTFNQSKLNSFITQYSTGQVSVEIEWELQKENSKRWNPEIQYTSNYYKSTSVDFAVNTEGVYSEPRPIGTRYLTRNL

SEQ ID NO: 1191 - protein, 738 aa, Artificial Sequence
  source: /note="Description of Artificial Sequence: Synthetic polypeptide"
MAADGYLPDWLEDNLSEGIREWWALQPGAPKPKANQQHQDNARGLVLPGYKYLGPGNGLDKGEPVNAADAAALEHDKAYDQQLKAGDNPYLKYNHADAEFQERLKEDTSFGGNLGRAVFQAKKRLLEPLGLVEEAAKTAPGKKRPVEPSPQRSPDSSTGIGKKGQQPARKRLNFGQTGDSESVPDPQPLGEPPAAPSGVGPNTMAAGGGAPMADNNEGADGVGSSSGNWHCDSTWLGDRVITTSTRTWALPTYNNHLYKQISNGTSGGATNDNTYFGYSTPWGYFDFNRFHCHFSPRDWQRLINNNWGFRPKRLSFKLFNIQVKEVTQNEGTKTIANNLTSTIQVFTDSEYQLPYVLGSAHQGCLPPFPADVFMIPQYGYLTLNNGSQAVGRSSFYCLEYFPSQMLRTGNNFQFTYTFEDVPFHSSYAHSQSLDRLMNPLIDQYLYYLSRTQTTGGTANTQTLGFSQGGPNTMANQAKNWLPGPCYRQQRVSTTTGQNNNSNFAWTAGTKYHLNGRNSLANPGIAMATHKDDEERFFPSNGILIFGKQNAARDNADYSDVMLTSEEEIKTTNPVATEEYGIVADNLQQQNTAPQIGTVNSQGALPGMVWQNRDVYLQGPIWAKIPHTDGNFHPSPLMGGFGLKHPPPQILIKNTPVPADPPTTFNQSKLNSFITQYSTGQVSVEIEWELQKENSKRWNPEIQYTSNYYKSTSVDFAVNTEGVYSEPRPIGTRYLTRNL

SEQ ID NO: 1192 - protein, 725 aa, Artificial Sequence
  source: /note="Description of Artificial Sequence: Synthetic polypeptide"
MAADGYLPDWLEDNLSEGIREWWALQPGAPKPKANQQHQDNARGLVLPGYKYLGPGNGLDKGEPVNAADAAALEHDKAYDQQLKAGDNPYLKYNHADAEFQERLKEDTSFGGNLGRAVFQAKKRLLEPLGLVEEAAKTAPTGKRIDDHFPKRKKARTEEDSKPSTSSDAEAGPSGSQQLQIPAQPASSLGADTMSAGGGGPLGDNNQGADGVGNASGDWHCDSTWMGDRVVTKSTRTWVLPSYNNHQYREIKSGSVDGSNANAYFGYSTPWGYFDFNRFHSHWSPRDWQRLINNYWGFRPRSLRVKIFNIQVKEVTVQDSTTTIANNLTSTVQVFTDDDYQLPYVVGNGTEGCLPAFPPQVFTLPQYGYATLNRDNTENPTERSSFFCLEYFPSKMLRTGNNFEFTYNFEEVPFHSSFAPSQNLFKLANPLVDQYLYRFVSTNNTGGVQFNKNLAGRYANTYKNWFPGPMGRTQGWNLGSGVNRASVSAFATTNRMELEGASYQVPPQPNGMTNNLQGSNTYALENTMIFNSQPANPGTTATYLEGNMLITSESETQPVNRVAYNVGGQMATNNQSSTTAPATGTYNLQEIVPGSVWMERDVYLQGPIWAKIPETGAHFHPSPAMGGFGLKHPPPMMLIKNTPVPGNITSFSDVPVSSFITQYSTGQVTVEMEWELKKENSKRWNPEIQYTNNYNDPQFVDFAPDSTGEYRTTRPIGTRYLTRPL

SEQ ID NO: 1193 - protein, 736 aa, Artificial Sequence
  source: /note="Description of Artificial Sequence: Synthetic polypeptide"
MAADGYLPDWLEDNLSEGIREWWALKPGAPKPKANQQKQDDGRGLVLPGYKYLGPFNGLDKGEPVNAADAAALEHDKAYDQQLQAGDNPYLRYNHADAEFQERLQEDTSFGGNLGRAVFQAKKRVLEPLGLVEEGAKTAPGKKRPVDQSPQEPDSSSGVGKSGKQPARKRLNFGQTGDSESVPDPQPLGEPPAAPTSLGSNTMASGGGAPMADNNEGADGVGNSSGNWHCDSQWLGDRVITTSTRTWALPTYNNHLYKQISSQSGASNDNHYFGYSTPWGYFDFNRFHCHFSPRDWQRLINNNWGFRPKKLSFKLFNIQVKEVTQNDGTTTIANNLTSTVQVFTDSEYQLPYVLGSAHQGCLPPFPADVFMVPQYGYLTLNNGSQAVGRSSFYCLEYFPSQMLRTGNNFQFSYTFEDVPFHSSYAHSQSLDRLMNPLIDQYLYYLNRTQGTTSGTTNQSRLLFSQAGPQSMSLQARNWLPGPCYRQQRLSKTANDNNNSNFPWTAASKYHLNGRDSLVNPGPAMASHKDDEEKFFPMHGNLIFGKEGTTASNAELDNVMITDEEEIRTTNPVATEQYGTVANNLQSSNTAPTTRTVNDQGALPGMVWQDRDVYLQGPIWAKIPHTDGHFHPSPLMGGFGLKHPPPQIMIKNTPVPANPPTTFSPAKFASFITQYSTGQVSVEIEWELQKENSKRWNPEIQYTSNYNKSVNVDFTVDTNGVYSEPRPIGTRYLTRNL

SEQ ID NO: 1194 - protein, 735 aa, Artificial Sequence
  source: /note="Description of Artificial Sequence: Synthetic polypeptide"
MSFVDHPPDWLEEVGEGLREFLGLEAGPPKPKPNQQHQDQARGLVLPGYNYLGPGNGLDRGEPVNRADEVAREHDISYNEQLEAGDNPYLKYNHADAEFQEKLADDTSFGGNLGKAVFQAKKRVLEPFGLVEEGAKTAPGKKRPVDQSPQEPDSSSGVGKSGKQPARKRLNFGQTGDSESVPDPQPLGEPPAAPTSLGSNTMASGGGAPMADNNEGADGVGNSSGNWHCDSQWLGDRVITTSTRTWALPTYNNHLYKQISSQSGASNDNHYFGYSTPWGYFDFNRFHCHFSPRDWQRLINNNWGFRPKKLSFKLFNIQVKEVTQNDGTTTIANNLTSTVQVFTDSEYQLPYVLGSAHQGCLPPFPADVFMVPQYGYLTLNNGSQAVGRSSFYCLEYFPSQMLRTGNNFQFSYTFEDVPFHSSYAHSQSLDRLMNPLIDQYLYYLNRTQGTTSGTTNQSRLLFSQAGPQSMSLQARNWLPGPCYRQQRLSKTANDNNNSNFPWTAASKYHLNGRDSLVNPGPAMASHKDDEEKFFPMHGNLIFGKEGTTASNAELDNVMITDEEEIRTTNPVATEQYGTVANNLQSSNTAPTTRTVNDQGALPGMVWQDRDVYLQGPIWAKIPHTDGHFHPSPLMGGFGLKHPPPQIMIKNTPVPANPPTTFSPAKFASFITQYSTGQVSVEIEWELQKENSKRWNPEIQYTSNYNKSVNVDFTVDTNGVYSEPRPIGTRYLTRPL

SEQ ID NO: 1195 - protein, 736 aa, Artificial Sequence
  source: /note="Description of Artificial Sequence: Synthetic polypeptide"
MAADGYLPDWLEDNLSEGIREWWALKPGAPKPKANQQKQDDGRGLVLPGYKYLGPFNGLDKGEPVNAADAAALEHDKAYDQQLQAGDNPYLRYNHADAEFQERLQEDTSFGGNLGRAVFQAKKRVLEPLGLVEEGAKTAPGKKRPVEPSPQRSPDSSTGIGKKGQQPARKRLNFGQTGDSESVPDPQPLGEPPAAPSGVGPNTMAAGGGAPMADNNEGADGVGSSSGNWHCDSTWLGDRVITTSTRTWALPTYNNHLYKQISSQSGASNDNHYFGYSTPWGYFDFNRFHCHFSPRDWQRLINNNWGFRPKRLSFKLFNIQVKEVTQNEGTKTIANNLTSTIQVFTDSEYQLPYVLGSAHQGCLPPFPADVFMIPQYGYLTLNNGSQAVGRSSFYCLEYFPSQMLRTGNNFQFTYTFEDVPFHSSYAHSQSLDRLMNPLIDQYLYYLSRTQTTGGTANTQTLGFSQGGPNTMANQAKNWLPGPCYRQQRVSTTTGQNNNSNFAWTAGTKYHLNGRNSLANPGIAMATHKDDEERFFPSNGILIFGKQGTTASNAELDNVMITDEEEIKTTNPVATEEYGIVADNLQQQNTAPQIGTVNSQGALPGMVWQNRDVYLQGPIWAKIPHTDGNFHPSPLMGGFGLKHPPPQILIKNTPVPADPPTTFNQSKLNSFITQYSTGQVSVEIEWELQKENSKRWNPEIQYTSNYNKSVNVDFTVDTNGVYSEPRPIGTRYLTRNL

SEQ ID NO: 1196 - protein, 736 aa, Artificial Sequence
  source: /note="Description of Artificial Sequence: Synthetic polypeptide"
MAADGYLPDWLEDNLSEGIREWWALKPGAPKPKANQQKQDDGRGLVLPGYKYLGPFNGLDKGEPVNAADAAALEHDKAYDQQLQAGDNPYLRYNHADAEFQERLQEDTSFGGNLGRAVFQAKKRVLEPLGLVEEGAKTAPGKKRPVEPSPQRSPDSSTGIGKKGQQPARKRLNFGQTGDSESVPDPQPLGEPPAAPSGVGPNTMAAGGGAPMADNNEGADGVGSSSGNWHCDSTWLGDRVITTSTRTWALPTYNNHLYKQISSQSGASNDNHYFGYSTPWGYFDFNRFHCHFSPRDWQRLINNNWGFRPKRLSFKLFNIQVKEVTQNEGTKTIANNLTSTIQVFTDSEYQLPYVLGSAHQGCLPPFPADVFMIPQYGYLTLNNGSQAVGRSSFYCLEYFPSQMLRTGNNFQFTYTFEDVPFHSSYAHSQSLDRLMNPLIDQYLYYLSRTQTTGGTANTQTLGFSQGGPNTMANQAKNWLPGPCYRQQRVSTTTGQNNNSNFAWTAGTKYHLNGRNSLANPGIAMATHKDDEERFFPSNGILIFGKQNAARDNADYSDVMLTSEEEIKTTNPVATEEYGIVADNLQQQNTAPQIGTVNSQGALPGMVWQNRDVYLQGPIWAKIPHTDGNFHPSPLMGGFGLKHPPPQILIKNTPVPADPPTTFNQSKLNSFITQYSTGQVSVEIEWELQKENSKRWNPEIQYTSNYYKSTSVDFAVNTEGVYSEPRPIGTRYLTRNL

SEQ ID NO: 1197 - protein, 736 aa, Artificial Sequence
  source: /note="Description of Artificial Sequence: Synthetic polypeptide"
MAADGYLPDWLEDNLSEGIREWWDLKPGAPKPKANQQKQDDGRGLVLPGYKYLGPFNGLDKGEPVNAADAAALEHDKAYDQQLKAGDNPYLRYNHADAEFQERLQEDTSFGGNLGRAVFQAKKRVLEPLGLVEEGAKTAPGKKRPVEQSPQEPDSSSGIGKTGQQPAKKRLNFGQTGDTESVPDPQPLGEPPAAPSGLGPNTMASGGGAPMADNNEGADGVGNSSGNWHCDSTWLGDRVITTSTRTWALPTYNNHLYKQISNGTSGGSTNDNTYFGYSTPWGYFDFNRFHCHFSPRDWQRLINNNWGFRPKRLNFKLFNIQVKEVTTNEGTKTIANNLTSTVQVFTDSEYQLPYVLGSAHQGCLPPFPADVFMVPQYGYLTLNNGSQALGRSSFYCLEYFPSQMLRTGNNFQFSYTFEDVPFHSSYAHSQSLDRLMNPLIDQYLYYLVRTQTTGTGGTQTLAFSQAGPSSMASQARNWVPGPSYRQQRVSTTTNQNNNSNFAWTGAAKFKLNGRDSLMNPGVAMASHKDDEDRFFPSSGVLIFGKQGAGNDGVDYSQVLITDEEEIKATNPVATEEYGAVAINNQAANTQAQTGLVHNQGVIPGMVWQNRDVYLQGPIWAKIPHTDGNFHPSPLMGGFGLKHPPPQILIKNTPVPADPPLTFNQAKLNSFITQYSTGQVSVEIEWELQKENSKRWNPEIQYTSNYYKSTNVDFAVNTEGVYSEPRPIGTRYLTRNL

SEQ ID NO: 1198 - DNA, 3695 bp, Artificial Sequence
  source: /note="Description of Artificial Sequence: Synthetic polynucleotide"
ctctttgcgcttgcgttttcccttgtccagatagcccagtagctgacattcatccggggtcagcaccgtttctgcggactggctttctacgtgaaaaggatctaggtgaagatcctttttgataatctcatgcctgacatttatattccccagaacatcaggttaatggcgtttttgatgtcattttcgcggtggctgagatcagccacttcttccccgataacggagaccggcacactggccatatcggtggtcatcatgcgccagctttcatccccgatatgcaccaccgggtaaagttcacgggagactttatctgacagcagacgtgcactggccagggggatcaccatccgtcgccccggcgtgtcaataatatcactctgtacatccacaaacagacgataacggctctctcttttataggtgtaaaccttaaactgccgtacgtataggctgcgcaactgttgggaagggcgatcggtgcgggcctcttcgctattacgccagctggcgaaagggggatgtgctgcaaggcgattaagttgggtaacgccagggttttcccagtcacgacgttgtaaaacgacggccagtgaattgtaatacgactcactatagggcgaattgaatttagcggccgcgaattcgcccttatgatatctggtgggaggagggcaagatgacggccaaggtcgtggagtccgccaaggccattctcggcggcagcaaagtgcgcgtggaccaaaagtgcaagtcgtccgcccagatcgatcccactcccgtcattgtcacctccaacaccaacatgtgcgccgtgattgacgggaacagcaccaccttcgagcaccagcagccgttgcaggaccggatgttcaaatttgaacttacccgccgtctggagcatgactttggcaaggtgacaaagcaggaagtcaaagagttcttccgctgggcgcaggatcacgtgaccgaggtggcgcatgagttccacgtcagaaagggtggagccaacaagagacccgcccccgatgacgctgataaaagcgagcccaagcgggcctgcccctcagtcgcagatccatcgacgtcagacgcggaaggagctccggtggactttgccgacaggtaccaaaacaaatgttctcgtcacgcgggcatgcttcagatgctgtttccctgcaagacatgcgagagaatgaatcagaatttcaacatttgcttcacgcacgggaccagggactgttcggagtgcttccccggcgtgtcagaatctcaaccggtcgtcagaaaaaggacgtatcggaaactctgtgccattcatcatctgctggggagggctcccgagattgcttgctcggcctgcgatctggtcaacgtggacctggatgactgtgtctctgagcaataaatgacttaaaccaggtatggctgccgatggttatcttccagattggctcgaggacaacctctctgagggcattcgcgagtggtgggacttgaaacctggagccccgaaacccaaagccaaccagcaaaagcaggacgacggccggggtctggtgcttcctggctacaagtacctcggacccttcaacggactcgacaagggggagcccgtcaacgcggcggacgcagcggccctcgagcacgacaaggcctacgaccagcagctcaaagcgggtgacaatccgtacctgcggtataaccacgccgacgccgagtttcaggagcgtctgcaagaagatacgtcttttgggggcaacctcgggcgagcagtcttccaggccaagaagcgggttctcgaacctctcggtctggttgaggaaggcgctaagacggctcctggaaagaagagaccggtagagcagtcaccccaagaaccagactcctcatcgggcatcggcaagacaggccagcagcccgctaaaaagagactcaattttggtcagactggcgacacagagtcagtccccgacccacaacctctcggagaacctccagcagccccctcaggtctgggacctaatacaatggcttcaggcggtggcgctccaatggcagacaataacgaaggcgccgacggagtgggtaattcctcgggaaattggcattgcgattccacatggctgggggacagagtcatcaccaccagcacccgaacctgggccctgcccacctacaacaaccacctctacaagcaaatctccaacggcacctcgggaggaagcaccaacgacaacacctactttggctacagcaccccctgggggtattttgacttcaacagattccactgccacttttcaccacgtgactggcagcgactcatcaacaacaattggggattccggcccaagagactcaacttcaagctcttcaacatccaggtcaaggaagtcacgacgaacgaaggcaccaagaccatcgccaataatctcaccagcaccgtgcaggtctttacggactcggagtaccagctaccgtacgtgctaggatcagctcaccagggatgtctgcctccgttcccggcggacgtcttcatggttcctcagtacggttatctaactctgaacaatggcagccaggccctgggacgttcctccttctactgcctggagtatttcccatcgcagatgctgagaaccggcaacaactttcagttcagctacaccttcgaggacgtgcctttccacagcagctacgcgcacagccaaagcctggacaggctgatgaatcccctcatcgaccagtacctgtattacctggtcagaacgcagacaaccgggactggagggacgcagactctggcattcagccaagcaggccctagctcaatggccagccaggctagaaactgggtgcccggaccgagctaccggcagcagcgcgtctccacgacaaccaaccagaacaacaacagcaactttgcctggacgggagctgccaaatttaaactgaacggccgagactctctaatgaaccccggcgtggccatggcttcacacaaggatgacgaggaccgcttcttcccttctagcggggtcctgattttcggcaagcaaggagccgggaatgatggagtggattacagccaagtgctgattacagatgaggaagaaatcaaggctaccaaccccgtggcaacagaggaatatggagcagtggccatcaacaaccaggccgctaatacgcaggcgcagaccggactcgtgcacaaccagggggtgattcccggcatggtgtggcagaacagagacgtgtacctgcagggtcccatctgggccaaaattcctcacacggacggcaactttcacccgtctcccctgatgggcggctttggactgaagcacccgcctcctcaaattctcatcaagaacacaccggttccagcggacccgccgcttaccttcaaccaggccaagctgaactctttcatcacgcagtacagcaccggacaggtcagcgtggaaatcgagtgggagctgcagaaagaaaacagcaaacgctggaatccagagattcagtacacttccaactactacaaatctacaaatgtggactttgctgtcaacacggaaggagtgtatagcgagcctcgccccattggcacccgttacctcacccgcaacctgtaattgcctgttaatcaataaaccggttaattcgtttcagtaaggaagaattcgtttaaa

SEQ ID NO: 1199 - protein, 736 aa, Artificial Sequence; identical to SEQ ID NO: 518
  source: /note="Description of Artificial Sequence: Synthetic polypeptide"

SEQ ID NO: 1200 - protein, 736 aa, Artificial Sequence
  source: /note="Description of Artificial Sequence: Synthetic polypeptide"
MAADGYLPDWLEDNLSEGIREWWDLKPGAPKPKANQQKQDDGRGLVLPGYKYLGPFNGLDKGEPVNAADAAALEHDKAYDQQLKAGDNPYLRYNHADAEFQERLQEDTSFGGNLGRAVFQAKKRVLEPLGLVEEGAKTAPGKKRPVEQSPQEPDSSSGIGKTGQQPAKKRLNFGQTGDTESVPDPQPLGEPPAAPSGLGPNTMASGGGAPMADNNEGADGVGNSSGNWHCDSTWLGDRVITTSTRTWALPTYNNHLYKQISNGTSGGSTNDNTYFGYSTPWGYFDFNRFHCHFSPRDWQRLINNNWGFRPKRLNFKLFNIQVKEVTTNEGTKTIANNLTSTVQVFTDSEYQLPYVLGSAHQGCLPPFPADVFMVPQYGYLTLNNGSQALGRSSFYCLEYFPSQMLRTGNNFQFSYTFEDVPFHSSYAHSQSLDRLMNPLIDQYLYYLVRTQTTGTGGTQTLAFSQAGPSNMASQARNWVPGPSYRQQRVSTTTNQNNNSNFAWTGAAKFKLNGRDSLMNPGVAMASHKDDEDRFFPSSGVLIFGKQGAGNDGVDYSQVLITDEEEIKATNPVATEEYGAVAINNQAANTQAQTGLVHNQGVIPGMVWQNRDVYLQGPIWAKIPHTDGNFHPSPLMGGFGLKHPPPQILIKNTPVPADPPLTFNQAKLNSFITQYSTGQVSVEIEWELQKENSKRWNPEIQYTSNYYKSTNVDFAVNTEGVYSEPRPIGTRYLTRNL

SEQ ID NO: 1201 - protein, 738 aa, Artificial Sequence; identical to SEQ ID NO: 895
  source: /note="Description of Artificial Sequence: Synthetic polypeptide"

SEQ ID NO: 1202 - protein, 736 aa, Artificial Sequence
  source: /note="Description of Artificial Sequence: Synthetic polypeptide"
MAADGYLPDWLEDNLSEGIREWWALQPGAPKPKANQQHQDNARGLVLPGYKYLGPGNGLDKGEPVNAADAAALEHDKAYDQQLKAGDNPYLKYNHADAEFQERLKEDTSFGGNLGRAVFQAKKRILEPLGLVEEAAKTAPGKKRPVDQSPQEPDSSSGVGKSGKQPARKRLNFGQTGDSESVPDPQPLGEPPAAPTSLGSNTMASGGGAPMADNNEGADGVGNSSGNWHCDSQWLGDRVITTSTRTWALPTYNNHLYKQISSQSGASNDNHYFGYSTPWGYFDFNRFHCHFSPRDWQRLINNNWGFRPKKLSFKLFNIQVKEVTQNDGTTTIANNLTSTVQVFTDSEYQLPYVLGSAHQGCLPPFPADVFMVPQYGYLTLNNGSQAVGRSSFYCLEYFPSQMLRTGNNFQFSYTFEDVPFHSSYAHSQSLDRLMNPLIDQYLYYLNRTQGTTSGTTNQSRLLFSQAGPQSMSLQARNWLPGPCYRQQRLSKTANDNNNSNFPWTAASKYHLNGRDSLVNPGPAMASHKDDEEKFFPMHGNLIFGKEGTTASNAELDNVMITDEEEIRTTNPVATEQYGTVANNLQSSNTAPTTRTVNDQGALPGMVWQDRDVYLQGPIWAKIPHTDGHFHPSPLMGGFGLKHPPPQIMIKNTPVPANPPTTFSPAKFASFITQYSTGQVSVEIEWELQKENSKRWNPEIQYTSNYNKSVNVDFTVDTNGVYSEPRPIGTRYLTRPL

SEQ ID NO: 1203 - protein, 736 aa, Artificial Sequence
  source: /note="Description of Artificial Sequence: Synthetic polypeptide"
MAADGYLPDWLEDNLSEGIREWWALQPGAPKPKANQQHQDNARGLVLPGYKYLGPGNGLDKGEPVNAADAAALEHDKAYDQQLKAGDNPYLKYNHADAEFQERLKEDTSFGGNLGRAVFQAKKRLLEPLGLVEEAAKTAPGKKRPVDQSPQEPDSSSGVGKSGKQPARKRLNFGQTGDSESVPDPQPLGEPPAAPTSLGSNTMASGGGAPMADNNEGADGVGNSSGNWHCDSQWLGDRVITTSTRTWALPTYNNHLYKQISSQSGASNDNHYFGYSTPWGYFDFNRFHCHFSPRDWQRLINNNWGFRPKKLSFKLFNIQVKEVTQNDGTTTIANNLTSTVQVFTDSEYQLPYVLGSAHQGCLPPFPADVFMVPQYGYLTLNNGSQAVGRSSFYCLEYFPSQMLRTGNNFQFSYTFEDVPFHSSYAHSQSLDRLMNPLIDQYLYYLNRTQGTTSGTTNQSRLLFSQAGPQSMSLQARNWLPGPCYRQQRLSKVANDNNNSNFPWTAASKYHLNGRDSLVNPGPAMASHKDDEEKFFPMHGNLIFGKEGTTASNAELDNVMITDEEEIRTTNPVATEQYGTVANNLQSSNTAPTTRTVNDQGALPGMVWQDRDVYLQGPIWAKIPHTDGHFHPSPLMGGFGLKHPPPQIMIKNTPVPANPPTTFVPAKFASFITQYSTGQVSVEIEWELQKENSKRWNPEIQYTSNYNKSVNVDFTVDTNGVYSEPRPIGTRYLTRPL

SEQ ID NO: 1204 - protein, 736 aa, Artificial Sequence; identical to SEQ ID NO: 912
  source: /note="Description of Artificial Sequence: Synthetic polypeptide"
  VARIANT (168)..(168): /replace="Arg"
  VARIANT (204)..(204): /replace="Ser"
  VARIANT (266)..(266): /replace="Gly"
  VARIANT (311)..(311): /replace="Lys"
  VARIANT (411)..(411): /replace="Gln"
  VARIANT (460)..(460): /replace="Glu"
  VARIANT (493)..(493): /replace="Thr"
  VARIANT (562)..(562): /replace="Asn"
  VARIANT (576)..(576): /replace="Glu"
  VARIANT (587)..(587): /replace="Ala"
  VARIANT (609)..(609): /replace="Asp"
  SITE (1)..(736): /note="Variant residues given in the sequence have no preference with respect to those in the annotations for variant positions"

SEQ ID NO: 1205 - DNA, 2208 bp, Artificial Sequence; identical to SEQ ID NO: 913
  source: /note="Description of Artificial Sequence: Synthetic polynucleotide"
  variation (502)..(504): /replace="agg"
  variation (610)..(612): /replace="agc"
  variation (796)..(798): /replace="ggc"
  variation (931)..(933): /replace="aag"
  variation (1231)..(1233): /replace="cag"
  variation (1378)..(1380): /replace="gag"
  variation (1477)..(1479): /replace="acc"
  variation (1684)..(1686): /replace="aac"
  variation (1726)..(1728): /replace="gag"
  variation (1759)..(1761): /replace="gcc"
  variation (1825)..(1827): /replace="gac"
  misc_feature (1)..(2208): /note="Variant nucleotides given in the sequence have no preference with respect to those in the annotations for variant positions"

SEQ ID NO: 1206 - protein, 737 aa, Artificial Sequence
  source: /note="Description of Artificial Sequence: Synthetic polypeptide"
  VARIANT (157)..(157): /replace="Ser"
  VARIANT (168)..(168): /replace="Arg"
  VARIANT (262)..(262): /replace="Ser"
  VARIANT (263)..(263): /replace="His"
  VARIANT (312)..(312): /replace="Lys"
  VARIANT (412)..(412): /replace="Gln"
  VARIANT (460)..(460): /replace="Gln"
  VARIANT (461)..(461): /replace="Glu"
  VARIANT (552)..(552): /replace="Ser"
  VARIANT (556)..(556): /replace="Tyr"
  VARIANT (557)..(557): /replace="Ser"
  VARIANT (563)..(563): /replace="Asn"
  VARIANT (580)..(580): /replace="Ile"
  VARIANT (588)..(588): /replace="Ser"
  VARIANT (664)..(664): /replace="Thr"
  SITE (1)..(737): /note="Variant residues given in the sequence have no preference with respect to those in the annotations for variant positions"
MAADGYLPDWLEDNLSEGIREWWDLKPGAPKPKANQQKQDDGRGLVLPGYKYLGPFNGLDKGEPVNAADAAALEHDKAYDQQLKAGDNPYLRYNHADAEFQERLQEDTSFGGNLGRAVFQAKKRVLEPLGLVEEGAKTAPGKKRPVEQSPQEPDSSTGIGKKGQQPAKKRLNFGQTGDSESVPDPQPLGEPPAAPSGVGSNTMAAGGGAPMADNNEGADGVGNASGNWHCDSTWLGDRVITTSTRTWALPTYNNHLYKQISNSQSGGSTNDNTYFGYSTPWGYFDFNRFHCHFSPRDWQRLINNNWGFRPKRLNFKLFNIQVKEVTTNDGTTTIANNLTSTVQVFTDSEYQLPYVLGSAHQGCLPPFPADVFMIPQYGYLTLNNGSQAVGRSSFYCLEYFPSQMLRTGNNFEFSYTFEDVPFHSSYAHSQSLDRLMNPLIDQYLYYLSRTQTTGGTAGNRTLQFSQAGPSSMANQAKNWLPGPCYRQQRVSKTTNQNNNSNFAWTGATKYHLNGRDSLVNPGVAMATHKDDEDRFFPSSGVLIFGKQGAGNDNVDLDNVMITSEEEIKTTNPVATEEYGVVATNLQSNNTAPQTGTVNSQGALPGMVWQNRDVYLQGPIWAKIPHTDGNFHPSPLMGGFGLKHPPPQILIKNTPVPANPPTTFSPAKFASFITQYSTGQVSVEIEWELQKENSKRWNPEIQYTSNYNKSTNVDFAVDTEGVYSEPRPIGTRYLTRNL

SEQ ID NO: 1207 - DNA, 2211 bp, Artificial Sequence; identical to SEQ ID NO: 915
  source: /note="Description of Artificial Sequence: Synthetic polynucleotide"
  variation (469)..(471): /replace="agc"
  variation (502)..(504): /replace="aga"
  variation (784)..(786): /replace="agt"
  variation (787)..(789): /replace="cac"
  variation (934)..(936): /replace="aag"
  variation (1234)..(1236): /replace="cag"
  variation (1378)..(1380): /replace="cag"
  variation (1381)..(1383): /replace="gag"
  variation (1654)..(1656): /replace="agc"
  variation (1666)..(1668): /replace="tac"
  variation (1669)..(1671): /replace="agc"
  variation (1687)..(1689): /replace="aac"
  variation (1738)..(1740): /replace="atc"
  variation (1762)..(1764): /replace="agc"
  variation (1990)..(1992): /replace="acc"
  misc_feature (1)..(2211): /note="Variant nucleotides given in the sequence have no preference with respect to those in the annotations for variant positions"

SEQ ID NO: 1208 - protein, 738 aa, Artificial Sequence; identical to SEQ ID NO: 916
  source: /note="Description of Artificial Sequence: Synthetic polypeptide"
  VARIANT (158)..(158): /replace="Ser"
  VARIANT (169)..(169): /replace="Arg"
  VARIANT (564)..(564): /replace="Asn"
  SITE (1)..(738): /note="Variant residues given in the sequence have no preference with respect to those in the annotations for variant positions"

SEQ ID NO: 1209 - DNA, 2214 bp, Artificial Sequence; identical to SEQ ID NO: 917
  source: /note="Description of Artificial Sequence: Synthetic polynucleotide"
  variation (472)..(474): /replace="agc"
  variation (505)..(507): /replace="aga"
  variation (1690)..(1692): /replace="aac"
  misc_feature (1)..(2214): /note="Variant nucleotides given in the sequence have no preference with respect to those in the annotations for variant positions"

SEQ ID NO: 1210 - protein, 738 aa, Artificial Sequence; identical to SEQ ID NO: 918
  source: /note="Description of Artificial Sequence: Synthetic polypeptide"
  VARIANT (158)..(158): /replace="Ser"
  VARIANT (169)..(169): /replace="Lys"
  VARIANT (315)..(315): /replace="Ser"
  VARIANT (413)..(413): /replace="Glu"
  VARIANT (472)..(472): /replace="Thr" or "Ser"
  VARIANT (534)..(534): /replace="Glu"
  VARIANT (542)..(542): /replace="Val"
  VARIANT (595)..(595): /replace="Val"
  SITE (1)..(738): /note="Variant residues given in the sequence have no preference with respect to those in the annotations for variant positions"

SEQ ID NO: 1211 - DNA, 2214 bp, Artificial Sequence
  source: /note="Description of Artificial Sequence: Synthetic polynucleotide"
  variation (472)..(474): /replace="agc"
  variation (505)..(507): /replace="aag"
  variation (943)..(945): /replace="agc"
  variation (1237)..(1239): /replace="gaa"
  variation (1414)..(1416): /replace="acc" or "agc"
  variation (1600)..(1602): /replace="gag"
  variation (1624)..(1626): /replace="gtc"
  variation (1783)..(1785): /replace="gta"
  misc_feature (1)..(2214): /note="Variant nucleotides given in the sequence have no preference with respect to those in the annotations for variant positions"
atggctgccgatggttatcttccagattggctcgaggacaacctctctgagggcattcgcgagtggtgggacctgaaacctggagccccgaaacccaaagccaaccagcaaaagcaggacgacggccggggtctggtgcttcctggctacaagtacctcggacccttcaacggactcgacaagggggagcccgtcaacgcggcggacgcagcggccctcgagcacgacaaggcctacgaccagcagctcaaagcgggtgacaatccgtacctgcggtataatcacgccgacgccgagtttcaggagcgtctgcaagaagatacgtcttttgggggcaacctcgggcgagcagtcttccaggccaagaagcgggttctcgaacctctcggtctggttgaggaaggcgctaagacggctcctggaaagaagagaccggtagagcagtcaccacagcgtgagcccgactcctccacgggcatcggcaagaaaggccagcagcccgccagaaagagactcaatttcggtcagactggcgactcagagtcagtccccgaccctcaacctctcggagaacctccagcagcgccctctggtgtgggatctaatacaatggctgcaggcggtggcgcaccaatggcagacaataacgaaggtgccgacggagtgggtagttcctcgggaaattggcattgcgattccacatggctgggcgacagagtcatcaccaccagcacccgaacctgggccctgcccacctacaacaaccacctctacaagcaaatctccaacgggacctcgggaggcagcaccaacgacaacacctactttggctacagcaccccctgggggtattttgactttaacagattccactgccacttctcaccacgtgactggcagcgactcatcaacaacaactggggattccggcccaagagactcaacttcaagctcttcaacatccaggtcaaagaggtcacgcagaatgaaggcaccaagaccatcgccaataacctcaccagcaccatccaggtgtttacggactcggaataccagctgccgtacgtcctcggctctgcccaccagggctgcctgcctccgttcccggcggacgtcttcatgattcctcagtacggctacctgactctcaacaacggtagtcaggccgtgggacgttcctccttctactgcctggagtacttcccctctcagatgctgagaacgggcaacaactttcaattcagctacactttcgaggacgtgcctttccacagcagctacgcgcacagccagagtttggacaggctgatgaatcctctcatcgaccagtacctgtactacctgtcaagaacccagactacgggaggcacagcgggaacccagacgttgcagttttctcaggccgggcctagcaacatggcgaatcaggccaaaaactggctgcctggaccctgctacagacagcagcgcgtctccacgacaacgtcgcaaaacaacaacagcaactttgcctggactggtgccaccaagtatcatctgaacggcagagactctctggtgaatccgggcgtcgccatggcaacccacaaggacgacgaggaccgcttcttcccatccagcggcatcctcatatttggcaagcagggagctggaaaagacaacgtggactatagcaacgtgatgctaaccagcgaggaagaaatcaagaccaccaaccccgtggccacagaagagtatggcgtggtggctgataacctacagcagcaaaacaccgctcctcaaatagggaccgtcaacagccagggagccttacctggcatggtctggcagaaccgggacgtgtacctgcagggtcctatttgggccaagattcctcacacagatggcaactttcacccgtctcctttaatgggcggctttggacttaaacatccgcctcctcagatcctcatcaaaaacactcctgttcctgcggatcctccaacaacgttcaaccaggccaagctgaattctttcatcacgcagtacagcaccggacaagtcagcgtggagatcgagtgggagctgcagaaggagaacagcaagcgctggaacccagagattcagtatacttccaactactacaaatctacaaatgtggactttgctgttaatactgagggtgtttactctgagcctcgccccattggcactcgttacctcacccgtaatctg

SEQ ID NO: 1212 - protein, 738 aa, Artificial Sequence; identical to SEQ ID NO: 920
  source: /note="Description of Artificial Sequence: Synthetic polypeptide"
  VARIANT (169)..(169): /replace="Lys"
  VARIANT (315)..(315): /replace="Ser"
  VARIANT (534)..(534): /replace="Glu"
  VARIANT (542)..(542): /replace="Val"
  SITE (1)..(738): /note="Variant residues given in the sequence have no preference with respect to those in the annotations for variant positions"

SEQ ID NO: 1213 - DNA, 2214 bp, Artificial Sequence; identical to SEQ ID NO: 921
  source: /note="Description of Artificial Sequence: Synthetic polynucleotide"
  variation (505)..(507): /replace="aaa"
  variation (943)..(945): /replace="agc"
  variation (1600)..(1602): /replace="gag"
  variation (1624)..(1626): /replace="gtc"
  misc_feature (1)..(2214): /note="Variant nucleotides given in the sequence have no preference with respect to those in the annotations for variant positions"

SEQ ID NO: 1214 - protein, 738 aa, Artificial Sequence; identical to SEQ ID NO: 922
  source: /note="Description of Artificial Sequence: Synthetic polypeptide"
  VARIANT (471)..(471): /replace="Asn"
  SITE (1)..(738): /note="Variant residues given in the sequence have no preference with respect to those in the annotations for variant positions"

SEQ ID NO: 1215 - DNA, 2214 bp, Artificial Sequence; identical to SEQ ID NO: 923
  source: /note="Description of Artificial Sequence: Synthetic polynucleotide"
  variation (1411)..(1413): /replace="aat"
  misc_feature (1)..(2214): /note="Variant nucleotides given in the sequence have no preference with respect to those in the annotations for variant positions"

SEQ ID NO: 1216 - protein, 737 aa, Artificial Sequence; identical to SEQ ID NO: 924
  source: /note="Description of Artificial Sequence: Synthetic polypeptide"
  VARIANT (148)..(148): /replace="Gln"
  VARIANT (169)..(169): /replace="Arg"
  VARIANT (314)..(314): /replace="Asn"
  VARIANT (466)..(466): /replace="His"
  VARIANT (563)..(563): /replace="Ser"
  VARIANT (580)..(580): /replace="Ile"
  VARIANT (588)..(588): /replace="Ser"
  SITE (1)..(737): /note="Variant residues given in the sequence have no preference with respect to those in the annotations for variant positions"

SEQ ID NO: 1217 - DNA, 2211 bp, Artificial Sequence; identical to SEQ ID NO: 925
  source: /note="Description of Artificial Sequence: Synthetic polynucleotide"
  variation (442)..(444): /replace="cag"
  variation (505)..(507): /replace="aga"
  variation (940)..(942): /replace="aac"
  variation (1396)..(1398): /replace="cac"
  variation (1687)..(1689): /replace="agt"
  variation (1738)..(1740): /replace="ata"
  variation (1762)..(1764): /replace="tct"
  misc_feature (1)..(2211): /note="Variant nucleotides given in the sequence have no preference with respect to those in the annotations for variant positions"

SEQ ID NO: 1218 - protein, 735 aa, Artificial Sequence; identical to SEQ ID NO: 926
  source: /note="Description of Artificial Sequence: Synthetic polypeptide"
  VARIANT (162)..(162): /replace="Thr"
  VARIANT (168)..(168): /replace="Arg"
  VARIANT (224)..(224): /replace="Ser"
  VARIANT (310)..(310): /replace="Lys"
  VARIANT (410)..(410): /replace="Gln"
  VARIANT (446)..(446): /replace="Asn"
  VARIANT (461)..(461): /replace="Leu"
  VARIANT (471)..(471): /replace="Ser"
  VARIANT (708)..(708): /replace="Thr"
  SITE (1)..(735): /note="Variant residues given in the sequence have no preference with respect to those in the annotations for variant positions"

SEQ ID NO: 1219 - DNA, 2205 bp, Artificial Sequence; identical to SEQ ID NO: 927
  source: /note="Description of Artificial Sequence: Synthetic polynucleotide"
  variation (484)..(486): /replace="aca"
  variation (502)..(504): /replace="aga"
  variation (670)..(672): /replace="tcc"
  variation (928)..(930): /replace="aaa"
  variation (1228)..(1230): /replace="cag"
  variation (1336)..(1338): /replace="aac"
  variation (1381)..(1383): /replace="ctg"
  variation (1411)..(1413): /replace="tct"
  variation (2122)..(2124): /replace="acc"
  misc_feature (1)..(2205): /note="Variant nucleotides given in the sequence have no preference with respect to those in the annotations for variant positions"

SEQ ID NO: 1220 - protein, 735 aa, Artificial Sequence; identical to SEQ ID NO: 928
  source: /note="Description of Artificial Sequence: Synthetic polypeptide"
  VARIANT (42)..(42): /replace="Ser"
  VARIANT (168)..(168): /replace="Lys"
  VARIANT (310)..(310): /replace="Arg"
  VARIANT (410)..(410): /replace="Gln"
  VARIANT (446)..(446): /replace="Arg"
  VARIANT (461)..(461): /replace="Leu"
  VARIANT (471)..(471): /replace="Ser"
  VARIANT (475)..(475): /replace="Arg"
  VARIANT (504)..(504): /replace="Ala"
  VARIANT (539)..(539): /replace="Asn"
  SITE (1)..(735): /note="Variant residues given in the sequence have no preference with respect to those in the annotations for variant positions"

SEQ ID NO: 1221 - DNA, 2205 bp, Artificial Sequence; identical to SEQ ID NO: 929
  source: /note="Description of Artificial Sequence: Synthetic polynucleotide"
  variation (124)..(126): /replace="agt"
  variation (502)..(504): /replace="aaa"
  variation (928)..(930): /replace="aga"
  variation (1228)..(1230): /replace="cag"
  variation (1336)..(1338): /replace="aga"
  variation (1381)..(1383): /replace="ctc"
  variation (1411)..(1413): /replace="tct"
  variation (1423)..(1425): /replace="aga"
  variation (1510)..(1512): /replace="gcg"
  variation (1615)..(1617): /replace="gac"
  misc_feature (1)..(2205): /note="Variant nucleotides given in the sequence have no preference with respect to those in the annotations for variant positions"

SEQ ID NO: 1222 - protein, 736 aa, Artificial Sequence; identical to SEQ ID NO: 930
  source: /note="Description of Artificial Sequence: Synthetic polypeptide"

SEQ ID NO: 1223 - protein, 736 aa, Artificial Sequence; identical to SEQ ID NO: 931
  source: /note="Description of Artificial Sequence: Synthetic polypeptide"

SEQ ID NO: 1224 - protein, 736 aa, Artificial Sequence; identical to SEQ ID NO: 932
  source: /note="Description of Artificial Sequence: Synthetic polypeptide"

SEQ ID NO: 1225 - protein, 736 aa, Artificial Sequence; identical to SEQ ID NO: 933
  source: /note="Description of Artificial Sequence: Synthetic polypeptide"

SEQ ID NO: 1226 - protein, 736 aa, Artificial Sequence; identical to SEQ ID NO: 934
  source: /note="Description of Artificial Sequence: Synthetic polypeptide"

SEQ ID NO: 1227 - protein, 736 aa, Artificial Sequence; identical to SEQ ID NO: 935
  source: /note="Description of Artificial Sequence: Synthetic polypeptide"

SEQ ID NO: 1228 - protein, 736 aa, Artificial Sequence; identical to SEQ ID NO: 936
  source: /note="Description of Artificial Sequence: Synthetic polypeptide"

SEQ ID NO: 1229 - protein, 736 aa, Artificial Sequence; identical to SEQ ID NO: 937
  source: /note="Description of Artificial Sequence: Synthetic polypeptide"

SEQ ID NO: 1230 - DNA, 2211 bp, Artificial Sequence; identical to SEQ ID NO: 938
  source: /note="Description of Artificial Sequence: Synthetic polynucleotide"

SEQ ID NO: 1231 - protein, 738 aa, Artificial Sequence; identical to SEQ ID NO: 18
  source: /note="Description of Artificial Sequence: Synthetic polypeptide"

SEQ ID NO: 1232 - protein, 738 aa, Artificial Sequence; identical to SEQ ID NO: 18
  source: /note="Description of Artificial Sequence: Synthetic polypeptide"

SEQ ID NO: 1233 - protein, 738 aa, Artificial Sequence
  source: /note="Description of Artificial Sequence: Synthetic polypeptide"
  VARIANT (157)..(157): /replace="Thr"
  VARIANT (169)..(169): /replace="Arg"
  VARIANT (457)..(457): /replace="Gly"
  VARIANT (463)..(463): /replace="Ala"
  VARIANT (508)..(508): /replace="Ala"
  VARIANT (510)..(510): /replace="Phe"
  VARIANT (511)..(511): /replace="Lys"
  VARIANT (558)..(558): /replace="Asn"
  VARIANT (585)..(585): /replace="His"
  VARIANT (587)..(587): /replace="Ala"
  SITE (1)..(738): /note="Variant residues given in the sequence have no preference with respect to those in the annotations for variant positions"
MAADGYLPDWLEDNLSEGIREWWDLKPGAPKPKANQQKQDDGRGLVLPGYKYLGPFNGLDKGEPVNAADAAALEHDKAYDQQLKAGDNPYLRYNHADAEFQERLQEDTSFGGNLGRAVFQAKKRVLEPLGLVEEGAKTAPGKKRPVEQSPQEPDSSSLGIGKTGQQPAKKRLNFGQTGDSESVPDPQPLGEPPAAPSGVGSNTMASGGGAPMADNNEGADGVGNSSGNWHCDSTWLGDRVITTSTRTWALPTYNNHLYKQISNGTSGGSTNDNTYFGYSTPWGYFDFNRFHCHFSPRDWQRLINNNWGFRPKRLNFKLFNIQVKEVTTNEGTKTIANNLTSTVQVFTDSEYQLPYVLGSAHQGCLPPFPADVFMIPQYGYLTLNNGSQAVGRSSFYCLEYFPSQMLRTGNNFQFSYTFEDVPFHSSYAHSQSLDRLMNPLIDQYLYYLSRTQTTGTAGTQTLQFSQAGPSSMANQARNWVPGPCYRQQRVSTTTNQNNNSNFAWTGATKYHLNGRDSLMNPGVAMASHKDDEDRFFPSSGVLIFGKQGAGNDNVDYSQVMITNEEEIKTTNPVATEEYGAVATNNQSLANTQAQTGLVHNQGVLPGMVWQNRDVYLQGPIWAKIPHTDGNFHPSPLMGGFGLKHPPPQILIKNTPVPADPPTTFNQAKLNSFITQYSTGQVSVEIEWELQKENSKRWNPEIQYTSNYYKSTNVDFAVNTEGVYSEPRPIGTRYLTRNL

SEQ ID NO: 1234 - DNA, 2211 bp, Artificial Sequence
  source: /note="Description of Artificial Sequence: Synthetic polynucleotide"
  variation (469)..(471): /replace="acg"
  variation (502)..(504): /replace="aga"
  variation (1366)..(1368): /replace="gga"
  variation (1384)..(1386): /replace="gca"
  variation (1519)..(1521): /replace="gcc"
  variation (1525)..(1527): /replace="ttt"
  variation (1528)..(1530): /replace="aaa"
  variation (1669)..(1671): /replace="aac"
  variation (1750)..(1752): /replace="cac"
  variation (1756)..(1758): /replace="gcc"
  misc_feature (1)..(2211): /note="Variant nucleotides given in the sequence have no preference with respect to those in the annotations for variant positions"
atggctgccgatggttatcttccagattggctcgaggacaacctctctgagggcattcgcgagtggtgggacttgaaacctggagccccgaaacccaaagccaaccagcaaaagcaggacgacggccggggtctggtgcttcctggctacaagtacctcggacccttcaacggactcgacaagggggagcccgtcaacgcggcggacgcagcggccctcgagcacgacaaagcctacgaccagcagctcaaagcgggtgacaatccgtacctgcggtataatcacgccgacgccgagtttcaggagcgtctgcaagaagatacgtcttttgggggcaacctcgggcgagcagtcttccaggccaagaagcgggttctcgaacctctcggtctggttgaggaaggcgctaagacggctcctggaaagaagaggccggtagagcagtcgccacaagagccagactcctcctcgggcatcggcaagacaggccagcagcccgctaaaaagagactcaattttggtcagactggcgactcagagtcagtccccgacccacaacctctcggagaacctccagcagccccctcaggtgtgggatctaatacaatggcttcaggcggtggcgctccaatggcagacaataacgaaggcgccgacggagtgggtaattcctcgggaaattggcattgcgattccacatggctgggggacagagtcatcaccaccagcacccgaacctgggccctgcccacctacaacaaccacctctacaagcaaatctccaacggcacctcgggaggaagcaccaacgacaacacctattttggctacagcaccccctgggggtattttgacttcaacagattccactgtcacttttcaccacgtgactggcaacgactcatcaacaacaattggggattccggcccaaaagactcaacttcaagctgttcaacatccaggtcaaggaagtcacgacgaacgaaggcaccaagaccatcgccaataatctcaccagcaccgtgcaggtctttacggactcggagtaccagttaccgtacgtgctaggatccgctcaccagggatgtctgcctccgttcccggcggacgtcttcatgattcctcagtacggctatttaactttaaacaatggaagccaagccgtgggacgttcctccttctactgtctggagtatttcccatcgcagatgctgagaaccggcaacaactttcagttcagctacaccttcgaggacgtgcctttccacagcagctacgcgcacagccagagcctggacaggctgatgaatcccctcatcgaccagtacctgtactacctgtccagaacgcaaacgactggaactgcagggacgcagactctgcaattcagccaagcgggtcctagctcaatggccaaccaggctagaaattgggtgcccggaccttgctaccggcagcagcgcgtctccacgacaaccaaccagaacaacaacagcaactttgcctggacgggagctaccaagtatcacctgaacggccgagactctctaatgaatccgggcgtggcaatggcttcccacaaggatgacgaggaccgcttcttcccttcgagcggggtcctgatttttggcaagcaaggagccgggaacgataatgtggattacagccaagtgatgattacaaatgaggaagaaatcaagactaccaaccccgtggccacagaagaatatggagcagtggccaccaacaaccagtccgccaatacgcaggcgcagaccggactcgtgcacaaccagggggtgcttcccggcatggtgtggcagaatagagacgtgtacctgcagggtcccatctgggccaaaattcctcacacggacggcaactttcacccgtctcccctgatgggcggctttggactgaagcacccgcctcctcaaattctcatcaagaacacaccggttccagcggacccgccgactaccttcaaccaggccaagctgaactctttcatcacgcagtacagcaccggacaggtcagcgtggaaatcgagtgggagctgcagaaagaaaacagcaaacgctggaatccagagattcaatacacttccaactactacaaatctacaaatgtggactttgctgtcaacacggagggggtttatagcgagcctcgccccattggcacccgttacctcacccgcaacctgtaa

SEQ ID NO: 1235 - protein, 733 aa, Artificial Sequence; identical to SEQ ID NO: 434
  source: /note="Description of Artificial Sequence: Synthetic polypeptide"

SEQ ID NO: 1236 - DNA, 4472 bp, Artificial Sequence
  source: /note="Description of Artificial Sequence: Synthetic polynucleotide"
ctccatcactaggggtaaccgcgaagcgcctcccacgctgccgcgtcagcgctgacgtaaattacgtcataggggagtggtcctgtattagctgtcacgtgagtgcttttgcgacattttgcgacaccacgtggccattcatggtatatatggccgagtgagcgagcaggatctccattttgaccgcgaaatttgaacgagcagcagccatgccgggcttctacgagatcgtgcttaaggtgccgagcgacctggacgagcacctgccgggcatttctgactcgtttgtgaactgggtggcagagaaggaatgggagctgcccccggattctgacatggatcggaatctgattgagcaggcacccctgaccgtggccgagaagctacagcgcgacttcctggtccaatggcgccgcgtgagtaaggccccggaggccctcttctttgttcagttcgagaagggcgagtcctacttccacctccatattctggtagagaccacgggggtcaaatccatggtgctgggccgcttcctgagtcagattcgggacaagctggtgcagaccatctaccgcgggatcgagccgaccctgcccaactggttcgcggtgacaaagacgcgtaatggcgccggaggggggaacaaggtggtggacgagtgctacatccccaactacctgctgcccaagactcagcccgagctgcagtgggcgtggactaacatggaggagtatataagcgcgtgcttgaacctggccgagcgcaaacggctcgtggcgcagcacctgacccacgtcagccagacccaggagcagaacaaggagaatctgaacccgaattctgacgcgcctgtcatccggtcaaaaacctccgcgcgctacatggagctggtcgggtggctggtggaccggggcatcacctccgagaagcagtggatccaggaggaccaggcctcgtacatctccttcaacgccgcctccaactcgcggtctcagatcaaggccgcgctggacaatgccggcaagatcatggcgctgaccaaatccgcgcccgactacctggtaggccccgctctgcccgcggacattaaatccaaccgcatctaccgcatcctggagctgaatggctacgaccctgcctacgccggttccgtctttctcggctgggcccagaaaaagtttggcaaaaggaacaccatctggctgtttgggccggccaccacgggcaagaccaacatcgcggaagccatcgcccacgccgtgcccttctacggctgcgtcaactggaccaatgagaactttcccttcaacgattgcgtcgacaagatggtgatctggtgggaggagggcaagatgacggccaaggtcgtggagtccgccaaggccattctcggcggcagcaaggtgcgcgtggaccaaaagtgcaagtcgtccgcccagatcgatcccacccccgtgatcgtcacctccaacaccaacatgtgcgccgtgattgacgggaacagcaccaccttcgagcaccagcagccgttgcaggaccggatgttcaaatttgaacttacccgccgtctggagcacgactttggcaaggtgacaaagcaggaagtcaaagagttcttccgctgggcgcaggatcacgtgaccgaggtggcgcatgagttctacgtcagaaagggtggagctaacaaaagacccgcccccgatgacgcggatataagcgagcccaagcgggcctgcccctcagtcgcggatccatcgacgtcagacgcggaaggagctccggtggactttgccgacaggtaccaaaacaaatgttctcgtcacgcgggcatgcttcagatgctgtttccctgcaaaacatgcgagagaatgaatcagaatttcaacatttgcttcacgcacgggaccagagactgttcagaatgtttccctggcgtgtcagaatctcaaccggtcgtcagaaaaaagacgtatcggaaactctgtgcgattcatcatctgctggggcgggcacccgagattgcttgctcggcctgcgacctggtcaacgtggacctggatgactgtgtttctgagcaataaatgacttaaaccaggtatggctgccgatggttatcttccagattggctcgaggacaacctctctgagggcattcgcgagtggtgggacctgaaacctggagccccgaaacccaaagccaaccagcaaaagcaggacaacggccggggtctggtgcttcctggctacaagtacctcggacccttcaacggactcgacaagggggagcccgtcaacgcggcggacgcagcggccctcgagcacgacaaggcctacgaccagcagctccaagcgggtgacaatccgtacctgcggtataatcacgccgacgccgagtttcaggagcgtctgcaagaagatacgtcttttgggggcaacctcgggcgcgcagtcttccaggccaaaaagcgggttctcgaacctctgggcctggttgaatcgccggttaagacggctcctggaaagaagagaccggtagagccatcaccccagcgctctccagactcctctacgggcatcggcaagaaaggccagcagcccgcaaaaaagagactcaattttgggcagactggcgactcagagtcagtccccgaccctcaaccaatcggagaaccaccagcaggcccctctggtctgggatctggtacaatggctgcaggcggtggcgctccaatggcagacaataacgaaggcgccgacggagtgggtagttcctcaggaaattggcattgcgattccacatggctgggcgacagagtcatcaccaccagcacccgcacctgggccctgcccacctacaacaaccacctctacaagcaaatctccaacgggacctcgggaggaagcaccaacgacaacacctacttcggctacagcaccccctgggggtattttgacttcaacagattccactgccacttttcaccacgtgactggcagcgactcatcaacaacaactggggattccggcccaagaggctcaacttcaagctcttcaacatccaagtcaaggaggtcacgcagaatgaaggcaccaagaccatcgccaataaccttaccagcacgattcaggtctttacggactcggaataccagctcccgtacgtgctcggctcggcgcaccagggctgcctgcctccgttcccggcggacgtcttcatgattcctcagtacgggtacctgactctgaacaatggcagtcaggctgtgggccggtcgtccttctactgcctggagtactttccttctcaaatgctgagaacgggcaacaactttgaattcagctacaacttcgaggacgtgcccttccacagcagctacgcgcacagccagagcctggaccggctgatgaaccctctcatcgaccagtacttgtactacctgtcccggactcaaagcacgggcggtactgcaggaactcagcagttgctattttctcaggccgggcctaacaacatgtcggctcaggccaagaactggctacccggtccctgctaccggcagcaacgcgtctccacgacactgtcgcagaacaacaacagcaactttgcctggacgggtgccaccaagtatcatctgaatggcagagactctctggtgaatcctggcgttgccatggctacccacaaggacgacgaagagcgattttttccatccagcggagtcttaatgtttgggaaacagggagctggaaaagacaacgtggactatagcagcgtgatgctaaccagcgaggaagaaataaagaccaccaacccagtggccacagaacagtacggcgtggtggccgataacctgcaacagcaaaacgccgctcctattgtaggggccgtcaatagtcaaggagccttacctggcatggtgtggcagaaccgggacgtgtacctgcagggtcccatctgggccaagattcctcatacggacggcaactttcatccctcgccgctgatgggaggctttggactgaagcatccgcctcctcagatcctgattaaaaacacacctgttcccgcggatcctccgaccaccttcactaaggccaagctggcttctttcatcacgcagtacagtaccggccaggtcagcgtggagatcgagtgggagctgcagaaggagaacagcaaacgctggaacccagagattcagtacacttccaactactacaaatctacaaatgtggactttgctgtcaatactgagggtacttattccgagcctcgccccattggcacccgttacctcacccgtaatctgtaattacatgttaatcaataaaccggttaattcgtttcagttgaactttggtctcctgtccttcttatcttatcggttaccatagaaactggttacttattaactgcttggtgcgcttcgcgataaaagacttacgtcatcgggttacccctagtgatgga

SEQ ID NO: 1237 - DNA, 2208 bp, Artificial Sequence
  source: /note="Description of Artificial Sequence: Synthetic polynucleotide"
atggctgccgatggttatcttccagattggctcgaggacactctctctgaaggaataagacagtggtggaagctcaaacctggcccaccaccaccaaagcccgcagagcggcataaggacgacagcaggggtcttgtgcttcctgggtacaagtacctcggacccttcaacggactcgacaagggagagccggtcaacgaggcagacgccgcggccctcgagcacgacaaagcctacgaccggcagctcgacagcggagacaacccgtacctcaagtacaaccacgccgacgcggagtttcaggagcgccttaaagaagatacgtcttttgggggcaacctcggacgagcagtcttccaggcgaaaaagagggttcttgaacctctgggcctggttgaggaacctgttaagaaggctccgggaaaaaagaggccggtagagcactctcctgtggagccagactcctcctcgggaaccggaaaggcgggccagcagcctgcaagaaaaagattgaattttggtcagactggagacgcagactcagtacctgacccccagcctctcggacagccaccagcagccccctctggtctgggaactaataccatggctacaggcagtggcgcaccaatggcagacaataacgagggtgccgacggagtgggtaattcctcgggaaattggcattgcgattccacatggatgggcgacagagtcatcaccaccagcacccgaacctgggccctgcccacctacaacaaccacctctacaaacaaatttccagccaatcaggagcctcgaacgacaatcactactttggctacagcaccccttgggggtattttgacttcaacagattccactgccacttttcaccacgtgactggcaaagactcatcaacaacaactggggattccgacccaagagactcaacttcaagctctttaacattcaagtcaaagaggtcacgcagaatgacggtacgacgacgattgccaataaccttaccagcacggttcaggtgtttactgactcggagtaccagctcccgtacgtcctcggctcggcgcatcaaggatgcctcccgccgttcccagcagacgtcttcatggtgccacagtatggatacctcaccctgaacaacgggagtcaggcagtaggacgctcttcattttactgcctggagtactttccttctcagatgctgcgtaccggaaacaactttaccttcagctacacttttgaggacgttcctttccacagcagctacgctcacagccagagtctggaccgtctcatgaatcctctcatcgaccagtacctgtattacttgagcagaacaaacactccaagtggaaccaccacgcagtcaaggcttcagttttctcaggccggagcgagtgacattcgggaccagtctaggaactggcttcctggaccctgttaccgccagcagcgagtatcaaagacatctgcggataacaacaacagtgaatactcgtggactggagctaccaagtaccacctcaatggcagagactctctggtgaatccgggcccggctatggcaagccacaaggacgatgaagaaaagttttttcctcagagcggggttctcatctttgggaagcaaggctcagagaaaacaaatgtggacattgaaaaggtcatgattacagacgaagaggaaatcaggacaaccaatcccgtggctacggagcagtatggttctgtatctaccaacctccagagaggcaacagacaagcagctaccgcagatgtcaacacacaaggcgttcttccaggcatggtctggcaggacagagatgtgtaccttcaggggcccatctgggcaaagattccacacacggacggacattttcacccctctcccctcatgggtggattcggacttaaacaccctcctccacagattctcatcaagaacaccccggtgcctgcgaatccttcgaccaccttcagtgcggcaaagtttgcttccttcatcacacagtactccacgggacaggtcagcgtggagatcgagtgggagctgcagaaggaaaacagcaaacgctggaatcccgaaattcagtacacttccaactacaacaagtctgttaatgtggactttactgtggacactaatggcgtgtattcagagcctcgccccattggcaccagatacctgactcgtaatctgtaa

SEQ ID NO: 1238 - protein, 735 aa, Artificial Sequence
  source: /note="Description of Artificial Sequence: Synthetic polypeptide"
MAADGYLPDWLEDTLSEGIRQWWKLKPGPPPPKPAERHKDDSRGLVLPGYKYLGPFNGLDKGEPVNEADAAALEHDKAYDRQLDSGDNPYLKYNHADAEFQERLKEDTSFGGNLGRAVFQAKKRVLEPLGLVEEPVKKAPGKKRPVEHSPVEPDSSSGTGKAGQQPARKRLNFGQTGDADSVPDPQPLGQPPAAPSGLGTNTMATGSGAPMADNNEGADGVGNSSGNWHCDSTWMGDRVITTSTRTWALPTYNNHLYKQISSQSGASNDNHYFGYSTPWGYFDFNRFHCHFSPRDWQRLINNNWGFRPKRLNFKLFNIQVKEVTQNDGTTTIANNLTSTVQVFTDSEYQLPYVLGSAHQGCLPPFPADVFMVPQYGYLTLNNGSQAVGRSSFYCLEYFPSQMLRTGNNFTFSYTFEDVPFHSSYAHSQSLDRLMNPLIDQYLYYLSRTNTPSGTTTQSRLQFSQAGASDIRDQSRNWLPGPCYRQQRVSKTSADNNNSEYSWTGATKYHLNGRDSLVNPGPAMASHKDDEEKFFPQSGVLIFGKQGSEKTNVDIEKVMITDEEEIRTTNPVATEQYGSVSTNLQRGNRQAATADVNTQGVLPGMVWQDRDVYLQGPIWAKIPHTDGHFHPSPLMGGFGLKHPPPQILIKNTPVPANPSTTFSAAKFASFITQYSTGQVSVEIEWELQKENSKRWNPEIQYTSNYNKSVNVDFTVDTNGVYSEPRPIGTRYLTRNL

SEQ ID NO: 1239 - DNA, 8376 bp, Artificial Sequence
  source: /note="Description of Artificial Sequence: Synthetic polynucleotide"
aattcccatcatcaataatataccttattttggattgaagccaatatgataatgagggggtggagtttgtgacgtggcgcggggcgtgggaacggggcgggtgacgtagtagtctctagagtcctgtattagaggtcacgtgagtgttttgcgacattttgcgacaccatgtggtcacgctgggtatttaagcccgagtgagcacgcagggtctccattttgaagcgggaggtttgaacgcgcagccaccacgccggggttttacgagattgtgattaaggtccccagcgaccttgacgggcatctgcccggcatttctgacagctttgtgaactgggtggccgagaaggaatgggagttgccgccagattctgacatggatctgaatctgattgagcaggcacccctgaccgtggccgagaagctgcagcgcgactttctgacggaatggcgccgtgtgagtaaggccccggaggcccttttctttgtgcaatttgagaagggagagagctacttccacatgcacgtgctcgtggaaaccaccggggtgaaatccatggttttgggacgtttcctgagtcagattcgcgaaaaactgattcagagaatttaccgcgggatcgagccgactttgccaaactggttcgcggtcacaaagaccagaaatggcgccggaggcgggaacaaggtggtggatgagtgctacatccccaattacttgctccccaaaacccagcctgagctccagtgggcgtggactaatatggaacagtatttaagcgcctgtttgaatctcacggagcgtaaacggttggtggcgcagcatctgacgcacgtgtcgcagacgcaggagcagaacaaagagaatcagaatcccaattctgatgcgccggtgatcagatcaaaaacttcagccaggtacatggagctggtcgggtggctcgtggacaaggggattacctcggagaagcagtggatccaggaggaccaggcctcatacatctccttcaatgcggcctccaactcgcggtcccaaatcaaggctgccttggacaatgcgggaaagattatgagcctgactaaaaccgcccccgactacctggtgggccagcagcccgtggaggacatttccagcaatcggatttataaaattttggaactaaacgggtacgatccccaatatgcggcttccgtctttctgggatgggccacgaaaaagttcggcaagaggaacaccatctggctgtttgggcctgcaactaccgggaagaccaacatcgcggaggccatagcccacactgtgcccttctacgggtgcgtaaactggaccaatgagaactttcccttcaacgactgtgtcgacaagatggtgatctggtgggaggaggggaagatgaccgccaaggtcgtggagtcggccaaagccattctcggaggaagcaaggtgcgcgtggaccagaaatgcaagtcctcggcccagatagacccgactcccgtgatcgtcacctccaacaccaacatgtgcgccgtgattgacgggaactcaacgaccttcgaacaccagcagccgttgcaagaccggatgttcaaatttgaactcacccgccgtctggatcatgactttgggaaggtcaccaagcaggaagtcaaagactttttccggtgggcaaaggatcacgtggttgaggtggagcatgaattctacgtcaaaaagggtggagccaagaaaagacccgcccccagtgacgcagatataagtgagcccaaacgggtgcgcgagtcagttgcgcagccatcgacgtcagacgcggaagcttcgatcaactacgcagacaggtaccaaaacaaatgttctcgtcacgtgggcatgaatctgatgctgtttccctgcagacaatgcgagagaatgaatcagaattcaaatatctgcttcactcacggacagaaagactgtttagagtgctttcccgtgtcagaatctcaacccgtttctgtcgtcaaaaaggcgtatcagaaactgtgctacattcatcatatcatgggaaaggtgccagacgcttgcactgcctgcgatctggtcaatgtggatttggatgactgcatctttgaacaataaatgatttaaatcaggtatggctgccgatggttatcttccagattggctcgaggacactctctctgaaggaataagacagtggtggaagctcaaacctggcccaccaccaccaaagcccgcagagcggcataaggacgacagcaggggtcttgtgcttcctgggtacaagtacctcggacccttcaacggactcgacaagggagagccggtcaacgaggcagacgccgcggccctcgagcacgacaaagcctacgaccggcagctcgacagcggagacaacccgtacctcaagtacaaccacgccgacgcggagtttcaggagcgccttaaagaagatacgtcttttgggggcaacctcggacgagcagtcttccaggcgaaaaagagggttcttgaacctctgggcctggttgaggaacctgttaagacggctccgggaaaaaagaggccggtagagcactctcctgtggagccagactcctcctcgggaaccggaaaggcgggccagcagcctgcaagaaaaagattgaattttggtcagactggagacgcagactcagtacctgacccccagcctctcggacagccaccagcagccccctctggtctgggaactaatacgatggctacaggcagtggcgcaccaatggcagacaataacgagggcgccgacggagtgggtaattcctcgggaaattggcattgcgattccacatggatgggcgacagagtcatcaccaccagcacccgaacctgggccctgcccacctacaacaaccacctctacaaacaaatttccagccaatcaggagcctcgaacgacaatcactactttggctacagcaccccttgggggtattttgacttcaacagattccactgccacttttcaccacgtgactggcaaagactcatcaacaacaactggggattccgacccaagagactcaacttcaagctctttaacattcaagtcaaagaggtcacgcagaatgacggtacgacgacgattgccaataaccttaccagcacggttcaggtgtttactgactcggagtaccagctcccgtacgtcctcggctcggcgcatcaaggatgcctcccgccgttcccagcagacgtcttcatggtgccacagtatggatacctcaccctgaacaacgggagtcaggcagtaggacgctcttcattttactgcctggagtactttccttctcagatgctgcgtaccggaaacaactttaccttcagctacacttttgaggacgttcctttccacagcagctacgctcacagccagagtctggaccgtctcatgaatcctctcatcgaccagtacctgtattacttgagcagaacaaacactccaagtggaaccaccacgcagtcaaggcttcagttttctcaggccggagcgagtgacattcgggaccagtctaggaactggcttcctggaccctgttaccgccagcagcgagtatcaaagacatctgcggataacaacaacagtgaatactcgtggactggagctaccaagtaccacctcaatggcagagactctctggtgaatccgggcccggccatggcaagccacaaggacgatgaagaaaagttttttcctcagagcggggttctcatctttgggaagcaaggctcagagaaaacaaatgtggacattgaaaaggtcatgattacagacgaagaggaaatcaggacaaccaatcccgtggctacggagcagtatggttctgtatctaccaacctccagagaggcaacagacaagcagctaccgcagatgtcaacacacaaggcgttcttccaggcatggtctggcaggacagagatgtgtaccttcaggggcccatctgggcaaagattccacacacggacggacattttcacccctctcccctcatgggtggattcggacttaaacaccctcctccacagattctcatcaagaacaccccggtacctgcgaatccttcgaccaccttcagtgcggcaaagtttgcttccttcatcacacagtactccacgggacaggtcagcgtggagatcgagtgggagctgcagaaggaaaacagcaaacgctggaatcccgaaattcagtacacttccaactacaacaagtctgttaatgtggactttactgtggacactaatggcgtgtattcagagcctcgccccattggcaccagatacctgactcgtaatctgtaattgcttgttaatcaataaaccgtttaattcgtttcagttgaactttggtctctgcgtatttctttcttatctagtttccatgctctagagtcctgtattagaggtcacgtgagtgttttgcgacattttgcgacaccatgtggtcacgctgggtatttaagcccgagtgagcacgcagggtctccattttgaagcgggaggtttgaacgcgcagccaccacggcggggttttacgagattgtgattaaggtccccagcgaccttgacgggcatctgcccggcatttctgacagctttgtgaactgggtggccgagaaggaatgggagttgccgccagattctgacatggatctgaatctgattgagcaggcacccctgaccgtggccgagaagctgcatcgctggcgtaatagcgaagaggcccgcaccgatcgcccttcccaacagttgcgcagcctgaatggcgaatggaattccagacgattgagcgtcaaaatgtaggtatttccatgagcgtttttcctgttgcaatggctggcggtaatattgttctggatattaccagcaaggccgatagtttgagttcttctactcaggcaagtgatgttattactaatcaaagaagtattgcgacaacggttaatttgcgtgatggacagactcttttactcggtggcctcactgattataaaaacacttctcaggattctggcgtaccgttcctgtctaaaatccctttaatcggcctcctgtttagctcccgctctgattctaacgaggaaagcacgttatacgtgctcgtcaaagcaaccatagtacgcgccctgtagcggcgcattaagcgcggcgggtgtggtggttacgcgcagcgtgaccgctacacttgccagcgccctagcgcccgctcctttcgctttcttcccttcctttctcgccacgttcgccggctttccccgtcaagctctaaatcgggggctccctttagggttccgatttagtgctttacggcacctcgaccccaaaaaacttgattagggtgatggttcacgtagtgggccatcgccctgatagacggtttttcgccctttgacgttggagtccacgttctttaatagtggactcttgttccaaactggaacaacactcaaccctatctcggtctattcttttgatttataagggattttgccgatttcggcctattggttaaaaaatgagctgatttaacaaaaatttaacgcgaattttaacaaaatattaacgtttacaatttaaatatttgcttatacaatcttcctgtttttggggcttttctgattatcaaccggggtacatatgattgacatgctagttttacgattaccgttcatcgattctcttgtttgctccagactctcaggcaatgacctgatagcctttgtagagacctctcaaaaatagctaccctctccggcatgaatttatcagctagaacggttgaatatcatattgatggtgatttgactgtctccggcctttctcacccgtttgaatctttacctacacattactcaggcattgcatttaaaatatatgagggttctaaaaatttttatccttgcgttgaaataaaggcttctcccgcaaaagtattacagggtcataatgtttttggtacaaccgatttagctttatgctctgaggctttattgcttaattttgctaattctttgccttgcctgtatgatttattggatgttggaattcctgatgcggtattttctccttacgcatctgtgcggtatttcacaccgcatatggtgcactctcagtacaatctgctctgatgccgcatagttaagccagccccgacacccgccaacacccgctgacgcgccctgacgggcttgtctgctcccggcatccgcttacagacaagctgtgaccgtctccgggagctgcatgtgtcagaggttttcaccgtcatcaccgaaacgcgcgagacgaaagggcctcgtgatacgcctatttttataggttaatgtcatgataataatggtttcttagacgtcaggtggcacttttcggggaaatgtgcgcggaacccctatttgtttatttttctaaatacattcaaatatgtatccgctcatgagacaataaccctgataaatgcttcaataatattgaaaaaggaagagtatgagtattcaacatttccgtgtcgcccttattcccttttttgcggcattttgccttcctgtttttgctcacccagaaacgctggtgaaagtaaaagatgctgaagatcagttgggtgcacgagtgggttacatcgaactggatctcaacagcggtaagatccttgagagttttcgccccgaagaacgttttccaatgatgagcacttttaaagttctgctatgtggcgcggtattatcccgtattgacgccgggcaagagcaactcggtcgccgcatacactattctcagaatgacttggttgagtactcaccagtcacagaaaagcatcttacggatggcatgacagtaagagaattatgcagtgctgccataaccatgagtgataacactgcggccaacttacttctgacaacgatcggaggaccgaaggagctaaccgcttttttgcacaacatgggggatcatgtaactcgccttgatcgttgggaaccggagctgaatgaagccataccaaacgacgagcgtgacaccacgatgcctgtagcaatggcaacaacgttgcgcaaactattaactggcgaactacttactctagcttcccggcaacaattaatagactggatggaggcggataaagttgcaggaccacttctgcgctcggcccttccggctggctggtttattgctgataaatctggagccggtgagcgtgggtctcgcggtatcattgcagcactggggccagatggtaagccctcccgtatcgtagttatctacacgacggggagtcaggcaactatggatgaacgaaatagacagatcgctgagataggtgcctcactgattaagcattggtaactgtcagaccaagtttactcatatatactttagattgatttaaaacttcatttttaatttaaaaggatctaggtgaagatcctttttgataatctcatgaccaaaatcccttaacgtgagttttcgttccactgagcgtcagaccccgtagaaaagatcaaaggatcttcttgagatcctttttttctgcgcgtaatctgctgcttgcaaacaaaaaaaccaccgctaccagcggtggtttgtttgccggatcaagagctaccaactctttttccgaaggtaactggcttcagcagagcgcagataccaaatactgtccttctagtgtagccgtagttaggccaccacttcaagaactctgtagcaccgcctacatacctcgctctgctaatcctgttaccagtggctgctgccagtggcgataagtcgtgtcttaccgggttggactcaagacgatagttaccggataaggcgcagcggtcgggctgaacggggggttcgtgcacacagcccagcttggagcgaacgacctacaccgaactgagatacctacagcgtgagctatgagaaagcgccacgcttcccgaagggagaaaggcggacaggtatccggtaagcggcagggtcggaacaggagagcgcacgagggagcttccagggggaaacgcctggtatctttatagtcctgtcgggtttcgccacctctgacttgagcgtcgatttttgtgatgctcgtcaggggggcggagcctatggaaaaacgccagcaacgcggcctttttacggttcctggccttttgctggccttttgctcacatgttctttcctgcgttatcccctgattctgtggataaccgtattaccgcctttgagtgagctgataccgctcgccgcagccgaacgaccgagcgcagcgagtcagtgagcgaggaagcggaagagcgcccaatacgcaaaccgcctctccccgcgcgttggccgattcattaatgca

SEQ ID NO: 1240 - DNA, 1085 bp, Artificial Sequence
  source: /note="Description of Artificial Sequence: Synthetic polynucleotide"
  modified_base (611)..(611): a, c, t, or g
  modified_base (640)..(640): a, c, t, or g
  modified_base (1039)..(1039): a, c, t, or g
tgcccacttacaacaaccatctctacaagcaaatctccagcvvmdcaggagctascaacgacaaccactactttggctacagcaccccttgggggtattttgactttaacagattccactgccacttctcaccacgtgactggcagcgactcattaacaacaactggggattccggcccaagaaactcagcttcaagctcttcaacatccaagttagaggggtcacgcagaacgatggcacgacgactattgccaataaccttaccagcacggttcaagtgtttacggactcggagtatcagctcccgtacgtgctcgggtcggcgcaccaaggctgtctcccgccgtttccagcggacgtcttcatggtccctcagtatggatacctcaccctgaacaacggaagtcaagcggtgggacgctcatccttttactgcctggagtacttcccttcgcagatgctaaggactggaaataacttccaattcagctataccttcgaggatgtaccttttcacagcagctacgctcacagccagagtttggatcgcttgatgaatcctcttattgatcagtatctgtactacctgaacagaacgcaargcamcvcnrgcggaacarccrvcmhsmrsvvsctgvngtttagccaggctgggcctcagtctatgtctttgcaggccagaaattggctacctgggccctgctaccggcaacagagactttcaamarycbmcrvcsrsaacaacaacagtrastttccttggmcagcggccagcamatatcatctcaatggccgcgactcgctggtgaatccaggaccagctatggccagtcacrrggacgatrmsgrsaratttttccctatgcacggcaatctaatatttggcaaasaarrcrscrvsrvarvcratrycgmsdwcgrsvrsgtaatgattacggatgaagaagagattcgtaccaccaatcctgtggcaacagagcagtatggaactgtggcaaataacttgcagrvsvvsmrsrvcvvscccacgdhtvvsrnsgtcvmscatcagggggccttacctggcatggtgtggcaagatcgt

SEQ ID NO: 1241 - protein, 620 aa, Artificial Sequence
  source: /note="Description of Artificial Sequence: Synthetic polypeptide"
  MOD_RES (263)..(264): Any naturally occurring amino acid
  MOD_RES (267)..(267): Any naturally occurring amino acid
  MOD_RES (450)..(453): Any naturally occurring amino acid
  MOD_RES (456)..(460): Any naturally occurring amino acid
  MOD_RES (462)..(462): Any naturally occurring amino acid
  MOD_RES (491)..(495): Any naturally occurring amino acid
  MOD_RES (500)..(500): Any naturally occurring amino acid
  MOD_RES (504)..(504): Any naturally occurring amino acid
  MOD_RES (508)..(508): Any naturally occurring amino acid
  MOD_RES (528)..(528): Any naturally occurring amino acid
  MOD_RES (531)..(533): Any naturally occurring amino acid
  MOD_RES (546)..(557): Any naturally occurring amino acid
  MOD_RES (586)..(590): Any naturally occurring amino acid
  MOD_RES (593)..(595): Any naturally occurring amino acid
  MOD_RES (597)..(597): Any naturally occurring amino acid
MAADGYLPDWLEDNLSEGIREWWALKPGVPQPKANQQHQDNRRGLVLPGYKYLGPGNGLDKGEPVNEADAAALEHDKAYDQQLKAGDNPYLKYNHADAEFQERLQEDTSFGGNLGRAVFQAKKRILEPLGLVEEAAKTAPGKKGAVDQSPQEPDSSSGVGKSGKQPARKRLNFGQTGDSESVPDPQPLGEPPAAPTSLGSNTMASGGGAPMADNNEGADGVGNSSGNWHCDSQWLGDRVITTSTRTWALPTYNNHLYKQISSXXGAXNDNHYFGYSTPWGYFDFNRFHCHFSPRDWQRLINNNWGFRPKKLSFKLFNIQVRGVTQNDGTTTIANNLTSTVQVFTDSEYQLPYVLGSAHQGCLPPFPADVFMVPQYGYLTLNNGSQAVGRSSFYCLEYFPSQMLRTGNNFQFSYTFEDVPFHSSYAHSQSLDRLMNPLIDQYLYYLNRTQXXXXGTXXXXXLXFSQAGPQSMSLQARNWLPGPCYRQQRLSXXXXXNNNSXFPWXAASXYHLNGRDSLVNPGPAMASHXDDXXXFFPMHGNLIFGKXXXXXXXXXXXXVMITDEEEIRTTNPVATEQYGTVANNLQXXXXXPTXXXVXHQGALPGMVWQDRDVYLQGPIWA

SEQ ID NO: 1242 - DNA, 1491 bp, Artificial Sequence
  source: /note="Description of Artificial Sequence: Synthetic polynucleotide"
accaccagcaccagaacctgggccctgcccacttacaacaaccatctctacaagcaaatctccagccaatcaggagcttcaaacgacaaccactactttggctacagcaccccttgggggtattttgactttaacagattccactgccacttctcaccacgtgactggcagcgactcattaacaacaactggggattccggcccaagaaactcagcttcaagctcttcaacatccaagttagaggggtcacgcagaacgatggcacgacgactattgccaataaccttaccagcacggttcaagtgtttacggactcggagtatcagctcccgtacgtgctcgggtcggcgcaccaaggctgtctcccgccgtttccagcggacgtcttcatggtccctcagtatggatacctcaccctgaacaacggaagtcaagcggtgggacgctcatccttttactgcctggagtacttcccttcgcagatgctaaggactggaaataacttccaattcagctataccttcgaggatgtaccttttcacagcagctacgctcacagccagagtttggatcgcttgatgaatcctcttattgatcagtatctgtactacctgaacagaacgcaaggaacaacctctggaacaaccaaccaatcacggctgctttttagccaggctgggcctcagtctatgtctttgcaggccagaaattggctacctgggccctgctaccggcaacagagactttcaaagactgctaacgacaacaacaacagtaactttccttggacagcggccagcaaatatcatctcaatggccgcgactcgctggtgaatccaggaccagctatggccagtcacaaggacgatgaagaaaaatttttccctatgcacggcaatctaatatttggcaaagaagggacaacggcaagtaacgcagaattagataatgtaatgattacggatgaagaagagattcgtaccaccaatcctgtggcaacagagcagtatggaactgtggcaaataacttgcagagctcaaatacagctcccacgactggaactgtcaatcatcagggggccttacctggcatggtgtggcaagatcgtgacgtctaccttcaaggacctatctgggcaaagattcctcacacggatggacactttcatccttctcctctgatgggaggctttggactgaaacatccgcctcctcaaatcatgatcaaaaatactccggtaccggcaaatcctccgacgactttcagcccggccaagtttgcttcatttatcactcagtactccactggacaggtcagcgtggaaattgagtgggagctacagaaagaaaacagcaaacgttggaatccagagattcagtacacttccaactacaacaagtctgttaatgtggactttactgtagacactaatggtgtttatagtgaacctcgccctattggaacccggtatctcacacgaaacttgtga

SEQ ID NO: 1243 - protein, 482 aa, Artificial Sequence
  source: /note="Description of Artificial Sequence: Synthetic polypeptide"
TTSTRTWALPTYNNHLYKQISSQSGASNDNHYFGYSTPWYFDFNRFHCHFSPRDWQRLNNNWGFRPKKLSFKLFNIQRGVTQNDGTTTIANNLTSTQVFTDSEYQLPYVLGSAHQCLPPFPADVFMVPQYGYLTNNGSQAVGRSSFYCLEYFPQMLRTGNNFQFSYTFEDVPHSSYAHSQSLDRLMNPLIDYLYYLNRTQGTTSGTTNQSLLFSQAGPQSMSLQARNWLGPCYRQQRLSKTANDNNNSFPWTAASKYHLNGRDSLVNGPAMASHKDDEEKFFPMHGLIFGKEGTTASNAELDNVMITDEEEIRTTNPVATEQYGTVANNLQSSNTAPTTGTVNHQGALPGMVWQDRDVYLQGPIWAKIPHTDGHFHPSPLMGGFGLKHPPPQIMIKNTPVPANPPTTFSPAKFASFITQYSTGQVSVEIEWELQKENSKRWNPEIQYTSNYNKSVNVDFTVDTNGVYSEPRPIGTRYLTRNL

SEQ ID NO: 1244 - DNA, 1140 bp, Artificial Sequence
  source: /note="Description of Artificial Sequence: Synthetic polynucleotide"
  modified_base (636)..(636): a, c, t, or g
  modified_base (665)..(665): a, c, t, or g
  modified_base (1064)..(1064): a, c, t, or g
accaccagcaccagaacctgggccctgcccacttacaacaaccatctctacaagcaaatctccagcvvmdcaggagctascaacgacaaccactactttggctacagcaccccttgggggtattttgactttaacagattccactgccacttctcaccacgtgactggcagcgactcattaacaacaactggggattccggcccaagaaactcagcttcaagctcttcaacatccaagttagaggggtcacgcagaacgatggcacgacgactattgccaataaccttaccagcacggttcaagtgtttacggactcggagtatcagctcccgtacgtgctcgggtcggcgcaccaaggctgtctcccgccgtttccagcggacgtcttcatggtccctcagtatggatacctcaccctgaacaacggaagtcaagcggtgggacgctcatccttttactgcctggagtacttcccttcgcagatgctaaggactggaaataacttccaattcagctataccttcgaggatgtaccttttcacagcagctacgctcacagccagagtttggatcgcttgatgaatcctcttattgatcagtatctgtactacctgaacagaacgcaargcamcvcnrgcggaacarccrvcmhsmrsvvsctgvngtttagccaggctgggcctcagtctatgtctttgcaggccagaaattggctacctgggccctgctaccggcaacagagactttcaamarycbmcrvcsrsaacaacaacagtrastttccttggmcagcggccagcamatatcatctcaatggccgcgactcgctggtgaatccaggaccagctatggccagtcacrrggacgatrmsgrsaratttttccctatgcacggcaatctaatatttggcaaasaarrcrscrvsrvarvcratrycgmsdwcgrsvrsgtaatgattacggatgaagaagagattcgtaccaccaatcctgtggcaacagagcagtatggaactgtggcaaataacttgcagrvsvvsmrsrvcvvscccacgdhtvvsrnsgtcvmscatcagggggccttacctggcatggtgtggcaagatcgtgacgtctaccttcaaggacctatctgggca

SEQ ID NO: 1245 - protein, 620 aa, Artificial Sequence; identical to SEQ ID NO: 1241
  source: /note="Description of Artificial Sequence: Synthetic polypeptide"
  MOD_RES (263)..(264): Any naturally occurring amino acid
  MOD_RES (267)..(267): Any naturally occurring amino acid
  MOD_RES (450)..(453): Any naturally occurring amino acid
  MOD_RES (456)..(460): Any naturally occurring amino acid
  MOD_RES (462)..(462): Any naturally occurring amino acid
  MOD_RES (491)..(495): Any naturally occurring amino acid
  MOD_RES (500)..(500): Any naturally occurring amino acid
  MOD_RES (504)..(504): Any naturally occurring amino acid
  MOD_RES (508)..(508): Any naturally occurring amino acid
  MOD_RES (528)..(528): Any naturally occurring amino acid
  MOD_RES (531)..(533): Any naturally occurring amino acid
  MOD_RES (546)..(557): Any naturally occurring amino acid
  MOD_RES (586)..(590): Any naturally occurring amino acid
  MOD_RES (593)..(595): Any naturally occurring amino acid
  MOD_RES (597)..(597): Any naturally occurring amino acid

SEQ ID NO: 1246 - protein, 738 aa, Artificial Sequence; identical to SEQ ID NO: 18
  source: /note="Description of Artificial Sequence: Synthetic polypeptide"

SEQ ID NO: 1247 - DNA, 2258 bp, Artificial Sequence
  source: /note="Description of Artificial Sequence: Synthetic polynucleotide"
tcgaggacaacctctctgagggcattcgcgagtggtgggacttgaaacctggagccccgaaacccaaagccaaccagcaaaagcaggacgacggccggggtctggtgcttcctggctacaagtacctcggacccttcaacggactcgacaagggggagcccgtcaacgcggcggacgcagcggccctcgagcacgacaaggcctacgaccagcagctcaaagcgggtgacaatccgtacctgcggtataaccacgccgacgccgagtttcaggagcgtctgcaagaagatacgtcttttgggggcaacctcgggcgagcagtcttccaggccaagaagcgggttctcgaacctctcggtctggttgaggaaggcgctaagacggctcctggaaagaagagaccggtagagccatcaccccagcgttctccagactcctctacgggcatcggcaagaaaggccagcagcccgcgaaaaagagactcaactttgggcagactggcgactcagagtcagtgcccgaccctcaaccaatcggagaaccccccgcaggcccctctggtctgggatctggtacaatggctgcaggcggtggcgctccaatggcagacaataacgaaggcgccgacggagtgggtagttcctcaggaaattggcattgcgattccacatggctgggcgacagagtcatcaccaccagcacccgaacctgggccctccccacctacaacaaccacctctacaagcaaatctccaacgggacttcgggaggaagcaccaacgacaacacctacttcggctacagcaccccctgggggtattttgactttaacagattccactgccacttctcaccacgtgactggcagcgactcatcaacaacaactggggattccggcccaagagactcaacttcaagctcttcaacatccaggtcaaggaggtcacgcagaatgaaggcaccaagaccatcgccaataaccttaccagcacgattcaggtctttacggactcggaataccagctcccgtacgtcctcggctctgcgcaccagggctgcctgcctccgttcccggcggacgtcttcatgattcctcagtacgggtacctgactctgaacaatggcagtcaggccgtgggccgttcctccttctactgcctggagtactttccttctcaaatgctgagaacgggcaacaactttgagttcagctaccagtttgaggacgtgccttttcacagcagctacgcgcacagccaaagcctggaccggctgatgaaccccctcatcgaccagtacctgtactacctgtctcggactcagtccacgggaggtaccgcaggaactcagcagttgctattttctcaggccgggcctaataacatgtcggctcaggccaaaaactggctacccgggccctgctaccggcagcaacgcgtctccacgacactgtcgcaaaataacaacagcaactttgcctggaccggtgccaccaagtatcatctgaatggcagagactctctggtaaatcccggtgtcgctatggcaacccacaaggacgacgaagagcgattttttccgtccagcggagtcttaatgtttgggaaacagggagctggaaaagacaacgtggactatagcagcgttatgctaaccagtgaggaagaaattaaaaccaccaacccagtggccacagaacagtacggcgtggtggccgataacctgcaacagcaaaacgccgctcctattgtaggggccgtcaacagtcaaggagccttacctggcatggtctggcagaaccgggacgtgtacctgcagggtcctatctgggccaagattcctcacacggacggaaactttcatccctcgccgctgatgggaggctttggactgaaacacccgcctcctcagatcctgattaagaatacacctgttcccgcggatcctccaactaccttcagtcaagctaagctggcgtcgttcatcacgcagtacagcaccggacaggtcagcgtggaaattgaatgggagctgcagaaagaaaacagcaaacgctggaacccagagattcaatacacttccaactactacaaatctacaaatgtggactttgctgttaacacagatggcacttattctgagcctcgccccatcggcacccgttacctcacccgtaatctgtaattgcttgttaatcaataaaccggttgattcgtttcagttgaactttggtctctgcgaagggcgaattcgttt

SEQ ID NO: 1248 - DNA, 2208 bp, Artificial Sequence
  source: /note="Description of Artificial Sequence: Synthetic polynucleotide"
atggctgccgatggttatcttccagattggctcgaggacactctctctgaaggaataagacagtggtggaagctcaaacctggcccaccaccaccaaagcccgcagagcggcataaggacgacagcaggggtcttgtgcttcctgggtacaagtacctcggacccttcaacggactcgacaagggagagccggtcaacgaggcagacgccgcggccctcgagcacgacaaagcctacgaccggcagctcgacagcggagacaacccgtacctcaagtacaaccacgccgacgcggagtttcaggagcgccttaaagaagatacgtcttttgggggcaacctcggacgagcagtcttccaggcgaaaaagagggttcttgaacctctgggcctggttgaggaacctgttaagacggctccgggaaaaaagaggccggtagagcactctcctgtggagccagactcctcctcgggaaccggaaaggcgggccagcagcctgcaagaaaaagattgaattttggtcagactggagacgcagactcagtacctgacccccagcctctcggacagccaccagcagccccctctggtctgggaactaatacgatggctacaggcagtggcgcaccaatggcagacaataacgagggcgccgacggagtgggtaattcctcgggaaattggcattgcgattccacatggatgggcgacagagtcatcaccaccagcacccgaacctgggccctgcccacctacaacaaccacctctacaaacaaatttccagccaatcaggagcctcgaacgacaatcactactttggctacagcaccccttgggggtattttgacttcaacagattccactgccacttttcaccacgtgactggcaaagactcatcaacaacaactggggattccgacccaagagactcaacttcaagctctttaacattcaagtcaaagaggtcacgcagaatgacggtacgacgacgattgccaataaccttaccagcacggttcaggtgtttactgactcggagtaccagctcccgtacgtcctcggctcggcgcatcaaggatgcctcccgccgttcccagcagacgtcttcatggtgccacagtatggatacctcaccctgaacaacgggagtcaggcagtaggacgctcttcattttactgcctggagtactttccttctcagatgctgcgtaccggaaacaactttaccttcagctacacttttgaggacgttcctttccacagcagctacgctcacagccagagtctggaccgtctcatgaatcctctcatcgaccagtacctgtatttcttaagcagaacaaacactccaagtggaaccaccacgcagtcaaggcttcagttttctcaggccggagcgagtgacattcgggaccagtctaggaactggcttcctggaccctgttaccgccagcagcgagtatcaaagacatctgcggataacaacaacagtgaattctcgtggaccggtgctaccaagtaccacctcaatggcagagactctctggtgaatccgggcccggccatggcaagccacaaggacgatgaagaaaagttttttcctcagagcggggttctcatctttgggaagcaaggctcagagaaaacaaatgtggacattgaaaaggtcatgattacagacgaagaggaaatcaggacaaccaatcccgtggctacggagcagtatggttctgtatctaccaacctccagagaggcaacagacaagcagctaccgcagatgtcaacacacaaggcgttcttccaggcatggtctggcaggacagagatgtgtaccttcaggggcccatctgggcaaagattccacacacggacggacattttcacccctctcccctcatgggtggattcggacttaaacaccctcctccacagattctcatcaagaacaccccggtacctgcgaatccttcgaccaccttcagtgcggcaaagtttgcttccttcatcacacagtactccacgggacaggtcagcgtggagatcgagtgggagctgcagaaggaaaacagcaaacgctggaatcccgaaattcagtacacttccaactacaacaagtctgttaatgtggactttactgtggacactaatggcgtgtattcagagcctcgccccattggtaccagattcctgactcgtaatctgtaa

SEQ ID NO: 1249 - protein, 737 aa, Artificial Sequence
  source: /note="Description of Artificial Sequence: Synthetic polypeptide"
MAADGYLPDWLEDNLSEGIREWWDLKPGAPKPKANQQKQDNGRGLVLPGYKYLGPFNGLDKGEPVNAADAAALEHDKAYDQQLQAGDNPYLRYNHADAEFQERLQEDTSFGGNLGRAVFQAKKRVLEPLGLVESPVKTAPGKKRPVEPSPQRSPDSSTGIGKKGQQPAKKRLNFGQTGDSESVPDPQPIGEPPAAPSGVGPNTMAAGGGAPMADNNEGADGVGSSSGNWHCDSTWLGDRVITTSTRTWALPTYNNHLYKQISNGTSGGSTNDNTYFGYSTPWGYFDFNRFHCHFSPRDWQRLINNNWGFRPKRLNFKLFNIQVKEVTQNEGTKTIANNLTSTIQVFTDSEYQLPYVLGSAHQGCLPPFPADVFMIPQYGYLTLNNGSQAVGRSSFYCLEYFPSQMLRTGNNFEFSYNFEDVPFHSSYAHSQSLDRLMNPLIDQYLYYLSRTQSTGGTAGTQQLLFSQAGPNNMSAQAKNWLPGPCYRQQRVSTTLSQNNNSNFAWTGATKYHLNGRDSLVNPGVAMATHKDDEERFFPSSGVLMFGKQGAGKDNVDYSSVMLTSEEEIKTTNPVATEQYGWADNLQQQNAAPIVGAVNSQGALPGMVWQNRDVYLQGPIWAKIPHTDGNFHPSPLMGGFGLKHPPPQILIKNTPVPADPPTTFNQAKLASFITQYSTGQVSVEIEWELQKENSKRWNPEIQYTSNYYKSTNVDFAVNTEGTYSEPRPIGTRYLTRNL

SEQ ID NO: 1250 - DNA, 2211 bp, Artificial Sequence
  source: /note="Description of Artificial Sequence: Synthetic polynucleotide"
atggctgccgatggttatcttccagattggctcgaggacactctctctgaaggaataagacagtggtggaagctcaaacctggcccaccaccaccaaagcccgcagagcggcataaggacgacagcaggggtcttgtgcttcctgggtacaagtacctcggacccttcaacggactcgacaagggagagccggtcaacgaggcagacgccgcggccctcgagcacgacaaagcctacgaccggcagctcgacagcggagacaacccgtacctcaagtacaaccacgccgacgcggagtttcaggagcgccttaaagaagatacgtcttttgggggcaacctcggacgagcagtcttccaggcgaaaaagagggttcttgaacctctgggcctggttgaggaacctgttaagacggctccgggaaaaaagaggccggtagagcactctcctgtggagccagactcctcctcgggaaccggaaaggcgggccagcagcctgcaagaaaaagattgaattttggtcagactggagacgcagactcagtacctgacccccagcctctcggacagccaccagcagccccctctggtctgggaactaatacgatggctacaggcagtggcgcaccaatggcagacaataacgagggcgccgacggagtgggtaattcctcgggaaattggcattgcgattccacatggatgggcgacagagtcatcaccaccagcacccgaacctgggccctgcccacctacaacaaccacctctacaaacaaatttccagcgcttcaacgggagcctcgaacgacaatcactactttggctacagcaccccttgggggtattttgacttcaacagattccactgccacttttcaccacgtgactggcaaagactcatcaacaacaactggggattccgacccaagagactcaacttcaagctctttaacattcaagtcaaagaggtcacgcagaatgacggtacgacgacgattgccaataaccttaccagcacggttcaggtgtttactgactcggagtaccagctcccgtacgtcctcggctcggcgcatcaaggatgcctcccgccgttcccagcagacgtcttcatggtgccacagtatggatacctcaccctgaacaacgggagtcaggcagtaggacgctcttcattttactgcctggagtactttccttctcagatgctgcgtaccggaaacaactttaccttcagctacacttttgaggacgttcctttccacagcagctacgctcacagccagagtctggaccgtctcatgaatcctctcatcgaccagtacctgtattacttgagcagaacaaacactccaagtggaaccaccacgcagtcaaggcttcagttttctcaggccggagcgagtgacattcgggaccagtctaggaactggcttcctggaccctgttaccgccagcagcgagtatcaaagacatctgcggataacaacaacagtgaatactcgtggactggagctaccaagtaccacctcaatggcagagactctctggtgaatccgggcccggccatggcaagccacaaggacgatgaagaaaagttttttcctcagagcggggttctcatctttgggaagcaaggctcagagaaaacaaatgtggacattgaaaaggtcatgattacagacgaagaggaaatcaggacaaccaatcccgtggctacggagcagtatggttctgtatctaccaacctccagagaggcaacagacaagcagctaccgcagatgtcaacacacaaggcgttcttccaggcatggtctggcaggacagagatgtgtaccttcaggggcccatctgggcaaagattccacacacggacggacattttcacccctctcccctcatgggtggattcggacttaaacaccctcctccacagattctcatcaagaacaccccggtacctgcgaatccttcgaccaccttcagtgcggcaaagtttgcttccttcatcacacagtactccacgggacaggtcagcgtggagatcgagtgggagctgcagaaggaaaacagcaaacgctggaatcccgaaattcagtacacttccaactacgccaagtctgtcaatgtggactttactgtggacaataatggcgtgtattcagagcctcgccccattggcaccagatacctgactcgtaatctgtaa

SEQ ID NO: 1251 - DNA, 2208 bp, Artificial Sequence
  source: /note="Description of Artificial Sequence: Synthetic polynucleotide"
atggctgccgatggttatcttccagattggctcgaggacaacctctctgagggcattcgcgagtggtgggacttgaaacctggagccccgaagcccaaagccaaccagcaaaagcaggacgacggccggggtctggtgcttcctggctacaagtacctcggacccttcaacggactcgacaagggggagcccgtcaacgcggcggacgcagcggccctcgagcacgacaaggcctacgaccagcagctcaaagcgggtgacaatccgtacctgcggtataaccacgccgacgccgagtttcaggagcgtctgcaagaagatacgtcttttgggggcaacctcgggcgagcagtcttccaggccaagaagcgggttctcgaacctctcggtctggttgaggaaggcgctaagacggctcctggaaagaaacgtccggtagagcagtcgccacaagagccagactcctcctcgggcatcggcaagacaggccagcagcccgctaaaaagagactcaattttggtcagactggcgactcagagtcagtccccgatccacaacctctcggagaacctccagcaacccccgctgctgtgggacctactacaatggcttcaggcggtggcgcaccaatggcagacaataacgaaggcgccgacggagtgggtaatgcctcaggaaattggcattgcgattccacatggctgggcgacagagtcatcaccaccagcacccgcacctgggccttgcccacctacaataaccacctctacaagcaaatctccagtgcttcaggggccagcaacgacaaccactacttcggctacagcaccccctgggggtattttgatttcaacagattccactgccacttttcaccacgtgactggcagcgactcatcaacaacaattggggattccggcccaagagactcaacttcaaactcttcaacatccaagtcaaggaggtcacgacgaatgatggcgtcacaaccatcgctaataaccttaccagcacggttcaagtcttctcggactcggagtaccagcttccgtacgtcctcggctctgcgcaccagggctgcctccctccgttcccggcggacgtgttcatgattccgcaatacggctacctgacgctcaacaatggcagccaagccgtgggacgttcatccttttactgcctggaatatttcccttctcagatgctgagaacgggcaacaactttaccttcagctacacctttgaggaagtgcctttccacagcagctacgcgcacagccagagcctggaccggctgatgaatcctctcatcgaccaatacctgtattacctgaacagaactcaaaatcagtccggaagtgcccaaaacaaggacttgctgtttagccgtgggtctccagctggcatgtctgttcagcccaaaaactggctacctggaccctgttatcggcagcagcgcgtttctaaaacaaaaacagacaacaacaacagcaattttacctggactggtgcttcaaaatataacctcaatgggcgtgaatccatcatcaaccctggcactgctatggcctcacacaaagacgacgaagacaagttctttcccatgagcggtgtcatgatttttggaaaagagagcgccggagcttcaaacactgcattggacaatgtcatgattacagacgaagaggaaattaaagccactaaccctgtggccaccgaaagatttgggaccgtggcagtcaatttccagagcagcagcacagaccctgcgaccggagatgtgcatgctatgggagcattacctggcatggtgtggcaagatagagacgtgtacctgcagggtcccatttgggccaaaattcctcacacagatggacactttcacccgtctcctcttatgggcggctttggactcaagaacccgcctcctcagatcctcatcaaaaacacgcctgttcctgcgaatcctccggcggagttttcagctacaaagtttgcttcattcatcacccaatactccacaggacaagtgagtgtggaaattgaatgggagctgcagaaagaaaacagcaagcgctggaatcccgaagtgcagtacacatccaattatgcaaaatctgccaacgttgattttactgtggacaacaatggactttatactgagcctcgccccattggcacccgttaccttacccgtcccctgtaa

SEQ ID NO: 1252 - DNA, 2205 bp, Artificial Sequence
  source: /note="Description of Artificial Sequence: Synthetic polynucleotide"
atggctgccgatggttatcttccagattggctcgaggacaacctctdgagggcattcgcgagtggtgggacttgaaacctggagccccgaaacccaaagccaaccagcaaaagcaggacgacggccggggtdggtgcttcctggctacaagtacctcggacccttcaacggactcgacaagggggagcccgtcaacgcggcggatgcagcggccctcgagcacgacaaggcctacgaccagcagctcaaagcgggtgacaatccgtacctgcggtataaccacgccgacgccgagtttcaggagcgtctgcaagaagatacgtcttttgggggcaacctcgggcgagcagtcttccaggccaagaagagggttctcgaaccttttggtdggttgaggaaggtgctaagacggctcctggaaagaaacgtccggtagagcagtcgccacaagagccagactcctcctcgggcattggcaagacaggccagcagcccgctaaaaagagactcaattttggtcagactggcgactcagagtcagtccccgacccacaacctctcggagaacctccagcaacccccgctgctgtgggacctactacaatggcttcaggcggtggcgcaccaatggcagacaataacgaaggcgccgacggagtgggtaatgcctcaggaaattggcattgcgattccacatggctgggcgacagagtcatcaccaccagcacccgaacatgggccttgcccacctataacaaccacctctacaagcaaatctccagtgcttcaggggccagcaacgacaaccactacttcggctacagcaccccctgggggtattttgatttcaacagattccactgccatttctcaccacgtgactggcagcgactcatcaacaacaattggggattccggcccaagagactcaacttcaagctcttcaacatccaagtcaaggaggtcacgacgaatgatggcgtcacgaccatcgctaataaccttaccagcacggttcaagtcttctcggactcggagtaccagttgccgtacgtcctcggctctgcgcaccagggctgcctccctccgttcccggcggacgtgttcatgattccgcagtacggctacctaacgctcaacaatggcagccaggcagtgggacggtcatccttttactgcctggaatatttcccatcgcagatgctgagaacgggcaataactttaccttcagctacaccttcgaggacgtgcctttccacagcagctacgcgcacagccagagcctggaccggctgatgaatcctctcatcgaccagtacctgtattacctgaacagaactcagaatcagtccggaagtgcccaaaacaaggacttgctgtttagccgggggtctccagctggcatgtctgttcagcccaaaaactggctacctggaccctgttaccggcagcagcgcgtttctaaaacaaaaacagacaacaacaacagcaactttacctggactggtgcttcaaaatataaccttaatgggcgtgaatctataatcaaccctggcactgctatggcctcacacaaagacgacaaagacaagttctttcccatgagcggtgtcatgatttttggaaaggagagcgccggagcttcaaacactgcattggacaatgtcatgatcacagacgaagaggaaatcaaagccactaaccccgtggccaccgaaagatttgggactgtggcagtcaatctccagagcagcagcacagaccctgcgaccggagatgtgcatgttatgggagccttacctggaatggtgtggcaagacagagacgtatacctgcagggtcctatttgggccaaaattcctcacacggatggacactttcacccgtctcctctcatgggcggctttggacttaagcacccgcctcctcagatcctcatcaaaaacacgcctgttcctgcgaatcctccggcagagttttcggctacaaagtttgcttcattcatcacccagtattccacaggacaagtgagcgtggagattgaatgggagctgcagaaagaaaacagcaaacgctggaatcccgaagtgcagtatacatctaactatgcaaaatctgccaacgttgatttcactgtggacaacaatggactttatactgagcctcgccccattggcacccgttacctcacccgtcccctgtaa

SEQ ID NO: 1253 - DNA, 2208 bp, Artificial Sequence
  source: /note="Description of Artificial Sequence: Synthetic polynucleotide"
atggctgccgatggttatcttccagattggctcgaggacaacctctctgagggcattcgcgagtggtgggacttgaaacctggagccccgaaacccaaagccaaccagcaaaagcaggacgacggccggggtctggtgcttcctggctacaagtacctcggacccttcaacggactcgacaagggggagcccgtcaacgcggcggatgcagcggccctcgagcacgacaaggcctacgaccagcagctcaaagcgggtgacaatccgtacctgcggtataaccacgccgacgccgagtttcaggagcgtctgcaagaagatacgtcttttgggggcaacctcgggcgagcagtcttccaggccaagaagagggttctcgaaccttttggtctggttgaggaaggtgctaagacggctcctggaaagaaacgtccggtagagcagtcgccacaagagccagactcctcctcgggcattggcaagacaggccagcagcccgctaaaaagagactcaattttggtcagactggcgactcagagtcagtccccgacccacaacctctcggagaacctccagcaacccccgctgctgtgggacctactacaatggcttcaggcggtggcgcaccaatggcagacaataacgaaggcgccgacggagtgggtaatgcctcaggaaattggcattgcgattccacatggctgggcgacagagtcatcaccaccagcacccgaacatgggccttgcccacctataacaaccacctctacaagcaaatctccagtgcttcaggggccagcaacgacaaccactacttcggctacagcaccccctgggggtattttgatttcaacagattccactgccatttctcaccacgtgactggcagcgactcatcaacaacaattggggattccggcccaagagactcaacttcaagctcttcaacatccaagtcaaggaggtcacgacgaatgatggcgtcacgaccatcgctaataaccttaccagcacggttcaagtcttctcggactcggagtaccagttgccgtacgtcctcggctctgcgcaccagggctgcctccctccgttcccggcggacgtgttcatgattccgcagtacggctacctaacgctcaacaatggcagccaggcagtgggacggtcatccttttactgcctggaatatttcccatcgcagatgctgagaacgggcaataactttaccttcagctacaccttcgaggacgtgcctttccacagcagctacgcgcacagccagagcctggaccggctgatgaatcctctcatcgaccagtacctgtattacctgaacagaactcagaatcagtccggaagtgcccaaaacaaggacttgctgtttagccgggggtctccagctggcatgtctgttcagcccaaaaactggctacctggaccctgttaccggcagcagcgcgtttctaaaacaaaaacagacaacaacaacagcaactttacctggactggtgcttcaaaatataaccttaatgggcgtgaatctataatcaaccctggcactgctatggcctcacacaaagacgacgaagacaagttctttcccatgagcggtgtcatgatttttggaaaggagagcgccggagcttcaaacactgcattggacaatgtcatgatcacagacgaagaggaaatcaaagccactaaccccgtggccaccgaaagatttgggactgtggcagtcaatctccagagcagcagcacagaccctgcgaccggagatgtgcatgttatgggagccttacctggaatggtgtggcaagacagagacgtatacctgcagggtcctatttgggccaaaattcctcacacggatggacactttcacccgtctcctctcatgggcggctttggacttaagcacccgcctcctcagatcctcatcaaaaacacgcctgttcctgcgaatcctccggcagagttttcggctacaaagtttgcttcattcatcacccagtattccacaggacaagtgagcgtggagattgaatgggagctgcagaaagaaaacagcaaacgctggaatcccgaagtgcagtatacatctaactatgcaaaatctgccaacgttgatttcactgtggacaacaatggactttatactgagcctcgccccattggcacccgttacctcacccgtcccctgtaa

SEQ ID NO: 1254 - DNA, 2208 bp, Artificial Sequence
  source: /note="Description of Artificial Sequence: Synthetic polynucleotide"
atggctgccgatggttatcttccagattggctcgaggacactctctctgaaggaataagacagtggtggaagctcaaacctggcccaccaccaccaaagcccgcagagcggcataaggacgacagcaggggtcttgtgcttcctgggtacaagtacctcggacccttcaacggactcgacaagggagagccggtcaacgaggcagacgccgcggccctcgagcacgacaaagcctacgaccggcagctcgacagcggagacaacccgtacctcaagtacaaccacgccgacgcggagtttcaggagcgccttaaagaagatacgtcttttgggggcaacctcggacgagcagtcttccaggcgaaaaagagggttcttgaacctctgggcctggttgaggaacctgttaagacggctccgggaaaaaagaggccggtagagcactctcctgtggagccagactcctcctcgggaaccggaaaggcgggccagcagcctgcaagaaaaagattgaattttggtcagactggagacgcagactcagtacctgacccccagcctctcggacagccaccagcagccccctctggtctgggaactaatacgatggctacaggcagtggcgcaccaatggcagacaataacgagggcgccgacggagtgggtaattcctcgggaaattggcattgcgattccacatggatgggcgacagagtcatcaccaccagcacccgaacctgggccctgcccacctacaacaaccacctctacaaacaaatttccagccaatcaggagcctcgaacgacaatcactactttggctacagcaccccttgggggtattttgacttcaacagattccactgccacttttcaccacgtgactggcaaagactcatcaacaacaactggggattccgacccaagagactcaacttcaagctctttaacattcaagtcaaagaggtcacgcagaatgacggtacgacgacgattgccaataaccttaccagcacggttcaggtgtttactgactcggagtaccagctcccgtacgtcctcggctcggcgcatcaaggatgcctcccgccgttcccagcagacgtcttcatggtgccacagtatggatacctcaccctgaacaacgggagtcaggcagtaggacgctcttcattttactgcctggagtactttccttctcagatgctgcgtaccggaaacaactttaccttcagctacacttttgaggacgttcctttccacagcagctacgctcacagccagagtctggaccgtctcatgaatcctctcatcgaccagtacctgtattacttgagcagaacaaacactccaagtggaaccaccacgcagtcaaggcttcagttttctgtggccggacccagtaacatggctgtccagggaaggaactggcttcctggaccctgttaccgccagcagcgagtatcaaagacatctgcggataacaacaacagtgaatttgcttggactggagctaccaagtaccacctcaatggcagagactctctggtgaatccgggcccggccatggcaagccacaaggacgatgaagaaaagttttttcctcagagcggggttctcatctttgggaagcaaggctcagagaaaacaaatgtggacattgaaaaggtcatgattacagacgaagaggaaatcaggacaaccaatcccgtggctacggagcagtatggttctgtatctaccaacctccagcaacagaacacagcaccagctaccgcagatgtcaacacacaaggcgttcttccaggcatggtctggcaggacagagatgtgtaccttcaggggcccatctgggcaaagattccacacacggacggacattttcacccctctcccctcatgggtggattcggacttaaacaccctcctccacagattctcatcaagaacaccccggtacctgcgaatccttcgaccaccttcagtgcggcaaagtttgcttccttcatcacacagtactccacgggacaggtcagcgtggagatcgagtgggagctgcagaaggaaaacagcaaacgctggaatcccgaaattcagtacacttccaactacaacaagtctgttaatgtggactttactgtggacactaatggcgtgtattcagagcctcgccccattggcaccagatacctgactcgtaatctgtaa

SEQ ID NO: 1255 - protein, 735 aa, Artificial Sequence
  source: /note="Description of Artificial Sequence: Synthetic polypeptide"
MAADGYLPDWLEDTLSEGIRQWWKLKPGPPPPKPAERHKDDSRGLVLPGYKYLGPFNGLDKGEPVNEADAAALEHDKAYDRQLDSGDNPYLKYNHADAEFQERLKEDTSFGGNLGRAVFQAKKRVLEPLGLVEEPVKTAPGKKRPVEHSPVEPDSSSGTGKAGQQPARKRLNFGQTGDADSVPDPQPLGQPPAAPSGLGTNTMATGSGAPMADNNEGADGVGNSSGNWHCDSTWMGDRVITTSTRTWALPTYNNHLYKQISSQSGASNDNHYFGYSTPWGYFDFNRFHCHFSPRDWQRLINNNWGFRPKRLNFKLFNIQVKEVTQNDGTTTIANNLTSTVQVFTDSEYQLPYVLGSAHQGCLPPFPADVFMVPQYGYLTLNNGSQAVGRSSFYCLEYFPSQMLRTGNNFTFSYTFEDVPFHSSYAHSQSLDRLMNPLIDQYLYYLSRTNTPSGTTTQSRLQFSVAGPSNMAVQGRNWLPGPCYRQQRVSKTSADNNNSEFAWTGATKYHLNGRDSLVNPGPAMASHKDDEEKFFPQSGVLIFGKQGSEKTNVDIEKVMITDEEEIRTTNPVATEQYGSVSTNLQQQNTAPATADVNTQGVLPGMVWQDRDVYLQGPIWAKIPHTDGHFHPSPLMGGFGLKHPPPQILIKNTPVPANPSTTFSAAKFASFITQYSTGQVSVEIEWELQKENSKRWNPEIQYTSNYNKSVNVDFTVDTNGVYSEPRPIGTRYLTRNL

SEQ ID NO: 1256 - DNA, 2208 bp, Artificial Sequence
  source: /note="Description of Artificial Sequence: Synthetic polynucleotide"
atggctgccgatggttatcttccagattggctcgaggacactctctctgaaggaataagacagtggtggaagctcaaacctggcccaccaccaccaaagcccgcagagcggcataaggacgacagcaggggtcttgtgcttcctgggtacaagtacctcggacccttcaacggactcgacaagggagagccggtcaacgaggcagacgccgcggccctcgagcacgacaaagcctacgaccggcagctcgacagcggagacaacccgtacctcaagtacaaccacgccgacgcggagtttcaggagcgccttaaagaagatacgtcttttgggggcaacctcggacgagcagtcttccaggcgaaaaagaggattcttgaacctctgggcctggttgaggaacctgttaagacggctccgggaaaaaagaggccggtagagcactctcctgcggagccagactcctcctcgggaaccggaaagtcgggccagcagcctgcaagaaaaagattgaattttggtcagactggagacgcagactcagtacctgacccccagcctctcggacagccaccagcagccccctctggtctgggaactaatacgatggcttcaggcagtggcgcaccaatggcagacaataacgagggcgccgacggagtgggtaattcctcgggaaattggcattgcgattccacatggatgggcgacagagtcatcaccaccagcacccgaacctgggccctgcccacctacaacaaccacctctacaaacaaatttccagccaatcaggagcctcgaacgacaatcactactttggctacagcaccccttgggggtattttgacttcaacagattccactgccacttttcaccacgtgactggcaaagactcatcaacaacaactggggattccgacccaagagactcagcttcaagctctttaacattcaagtcaaagaggtcacgcagaatgacggtacgacgacgattgccaataaccttaccagcacggttcaggtgtttactgactcggagtaccagctcccgtacgtcctcggctcggcgcatcaaggatgcctcccgccgttcccagcagacgtcttcatggtgccacagtatggatacctcaccctgaacaacgggagtcaggcagtaggacgctcttcattttactgcctggagtactttccttctcagatgctgcgtaccggaaacaactttaccttcagctacacttttgaggacgttcctttccacagcagctacgctcacagccagagtctggaccgtctcatgaatcctctcatcgaccagtacctgtattacttgagcagaacaaacactccaagtggaaccaccacgatgtcaaggcttcagttttctcaggccggagcgagtgacattcgggaccagtctaggaactggcttcctggaccctgttaccgccagcagcgagtatcaaagacagctgcggataacaacaacagtgattactcgtggactggagctaccaagtaccacctcaatggcagagactctctggtgaatccgggcccggccatggcaagccacaaggacgatgaagaaaagtattttcctcagagcggggttctcatctttgggaagcaagactcaggaaaaacaaatgtggacattgaaaaggtcatgattacagacgaagaggaaatcaggacaaccaatcccgtggctacggagcagtatggttctgtatctaccaacctccagagcggcaacacacaagcagctacctcagatgtcaacacacaaggcgttcttccaggcatggtctggcaggacagagatgtgtaccttcaggggcccatctgggcaaagattccacacacggacggacattttcacccctctcccctcatgggtggattcggacttaaacaccctcctccacagattctcatcaagaacaccccggtacctgcgaatccttcgaccaccttcagtgcggcaaagtttgcttccttcatcacacagtactccacgggacaggtcagcgtggagatcgagtgggagctgcagaaggaaaacagcaaacgctggaatcccgaaattcagtacacttccaactacaacaagtctgttaatgtggactttactgtggacactaatggcgtgtattcagagcctcgccccattggcaccagatacctgactcgtaatctgtaa

SEQ ID NO: 1257 - DNA, 2208 bp, Artificial Sequence
  source: /note="Description of Artificial Sequence: Synthetic polynucleotide"
atggctgccgatggttatcttccagattggctcgaggacactctctctgaaggaataagacagtggtggaagctcaaacctggcccaccaccaccaaagcccgcagagcggcataaggacgacagcaggggtcttgtgcttcctgggtacaagtacctcggacccttcaacggactcgacaagggagagccggtcaacgaggcagacgccgcggccctcgagcacgacaaagcctacgaccggcagctcgacagcggagacaacccgtacctcaagtacaaccacgccgacgcggagtttcaggagcgccttaaagaagatacgtcttttgggggcaacctcggacgagcagtcttccaggcgaaaaagaggattcttgaacctctgggcctggttgaggaacctgttaagacggctccgggaaaaaagaggccggtagagcactctcctgcggagccagactcctcctcgggaaccggaaagtcgggccagcagcctgcaagaaaaagattgaattttggtcagactggagacgcagactcagtacctgacccccagcctctcggacagccaccagcagccccctctggtctgggaactaatacgatggcttcaggcagtggcgcaccaatggcagacaataacgagggcgccgacggagtgggtaattcctcgggaaattggcattgcgattccacatggatgggcgacagagtcatcaccaccagcacccgaacctgggccctgcccacctacaacaaccacctctacaaacaaatttccagccaatcaggagcctcgaacgacaatcactactttggctacagcaccccttgggggtattttgacttcaacagattccactgccacttttcaccacgtgactggcaaagactcatcaacaacaactggggattccgacccaagagactcaacttcaagctctttaacattcaagtcaaagaggtcacgcagaatgacggtacgacgacgattgccaataaccttaccagcacggttcaggtgtttactgactcggagtaccagctcccgtacgtcctcggctcggcgcatcaaggatgcctcccgccgttcccagcagacgtcttcatggtgccacagtatggatacctcaccctgaacaacgggagtcaggcagtaggacgctcttcattttactgcctggagtactttccttctcagatgctgcgtaccggaaacaactttaccttcagctacacttttgaggacgttcctttccacagcagctacgctcacagccagagtctggaccgtctcatgaatcctctcatcgaccagtacctgtattacttgagcagaacaaacactccaagtggaaccaccacgatgtcaaggcttcagttttctcaggccggagcgagtgacattcgggaccagtctaggaactggcttcctggaccctgttaccgccagcagcgagtatcaaagacagctgcggataacaacaacagtgattactcgtggactggagctaccaagtaccacctcaatggcagagactctctggtgaatccgggcccggccatggcaagccacaaggacgatgaagaaaagtattttcctcagagcggggttctcatctttgggaagcaagactcaggaaaaacaaatgtggacattgaaaaggtcatgattacagacgaagaggaaatcaggacaaccaatcccgtggctacggagcagtatggttctgtatctaccaacctccagagcggcaacacacaagcagctacctcagatgtcaacacacaaggcgttcttccaggcatggtctggcaggacagagatgtgtaccttcaggggcccatctgggcaaagattccacacacggacggacattttcacccctctcccctcatgggtggattcggacttaaacaccctcctccacagattctcatcaagaacaccccggtacctgcgaatccttcgaccaccttcagtgcggcaaagtttgcttccttcatcacacagtactccacgggacaggtcagcgtggagatcgagtgggagctgcagaaggaaaacagcaaacgctggaatcccgaaattcagtacacttccaactacaacaagtctgttaatgtggactttactgtggacactaatggcgtgtattcagagcctcgccccattggcaccagatacctgactcgtaatctgtaa

SEQ ID NO: 1258 - protein, 735 aa, Artificial Sequence
  source: /note="Description of Artificial Sequence: Synthetic polypeptide"
MAADGYLPDWLEDTLSEGIRQWWKLKPGPPPPKPAERHKDDSRGLVLPGYKYLGPFNGLDKGEPVNEADAAALEHDKAYDRQLDSGDNPYLKYNHADAEFQERLKEDTSFGGNLGRAVFQAKKRILEPLGLVEEPVKTAPGKKRPVEHSPAEPDSSSGTGKSGQQPARKRLNFGQTGDADSVPDPQPLGQPPAAPSGLGTNTMASGSGAPMADNNEGADGVGNSSGNWHCDSTWMGDRVITTSTRTWALPTYNNHLYKQISSQSGASNDNHYFGYSTPWGYFDFNRFHCHFSPRDWQRLINNNWGFRPKRLNFKLFNIQVKEVTQNDGTTTIANNLTSTVQVFTDSEYQLPYVLGSAHQGCLPPFPADVFMVPQYGYLTLNNGSQAVGRSSFYCLEYFPSQMLRTGNNFTFSYTFEDVPFHSSYAHSQSLDRLMNPLIDQYLYYLSRTNTPSGTTTMSRLQFSQAGASDIRDQSRNWLPGPCYRQQRVSKTAADNNNSDYSWTGATKYHLNGRDSLVNPGPAMASHKDDEEKYFPQSGVLIFGKQDSGKTNVDIEKVMITDEEEIRTTNPVATEQYGSVSTNLQSGNTQAATSDVNTQGVLPGMVWQDRDVYLQGPIWAKIPHTDGHFHPSPLMGGFGLKHPPPQILIKNTPVPANPSTTFSAAKFASFITQYSTGQVSVEIEWELQKENSKRWNPEIQYTSNYNKSVNVDFTVDTNGVYSEPRPIGTRYLTRNL

SEQ ID NO: 1259 - protein, 736 aa, Artificial Sequence
  source: /note="Description of Artificial Sequence: Synthetic polypeptide"
MAADGYLPDWLEDNLSEGIREWWDLKPGAPKPKANQQKQDDGRGLVLPGYKYLGPFNGLDKGEPVNAADAAALEHDKAYDQQLKAGDNPYLRYNHADAEFQERLQEDTSFGGNLGRAVFQAKKRVLEPFGLVEEGAKTAPGKKRPVEQSPQEPDSSSGIGKTGQQPAKKRLNFGQTGDSESVPDPQPLGEPPATPAAVGPTTMASGGGAPMADNNEGADGVGNASGNWHCDSTWLGDRVITTSTRTWALPTYNNHLYKQISSASTGASNDNHYFGYSTPWGYFDFNRFHCHFSPRDWQRLINNNWGFRPKRLNFKLFNIQVKEVTTNDGVTTIANNLTSTVQVFSDSEYQLPYVLGSAHQGCLPPFPADVFMIPQYGYLTLNNGSQAVGRSSFYCLEYFPSQMLRTGNNFTFSYTFEDVPFHSSYAHSQSLDRLMNPLIDQYLYFLNRTQNQSGSAQNKDLLFSRGSPAGMSVQPKNWLPGPCYRQQRVSKTKTDNNNSNFTWTGASKYNLNGRESIINPGTAMASHKDDKDKFFPMSGVMIFGKESAGASNTALDNVMITDEEEIKATNPVATERFGTVAVNLQSSSTDPATGDVHVMGALPGMVWQDRDVYLQGPIWAKIPHTDGHFHPSPLMGGFGLKHPPPQILIKNTPVPANPPAEFSATKFASFITQYSTGQVSVEIEWELQKENSKRWNPEVQYTSNYAKSANVDFTVDNNGLYTEPRPIGTRYLTRPL

SEQ ID NO: 1260 - protein, 747 aa, Artificial Sequence
  source: /note="Description of Artificial Sequence: Synthetic polypeptide"
MAADGYLPDWLEDTLSEGIRQWWKLKPGPPPPKPAERHKDDSRGLVLPGYKYLGPFNGLDKGEPVNEADAAALEHDKAYDRQLDSGDNPYLKYNHADAEFQERLKEDTSFGGNLGRAVFQAKKRVLEPLGLVEEPVKTAPGKKRPVEHSPVEPDSSSGTGKAGQQPARKRLNFGQTGDADSVPDPQPLGQPPAAPSGLGTNTMATGSGAPMADNNEGADGVGNSSGNWHCDSTWMGDRVITTSTRTWALPTYNNHLYKQISSQSGASNDNHYFGYSTPWGYFDFNRFHCHFSPRDWQRLINNNWGFRPKRLNFKLFNIQVKEVTQNDGTTTIANNLTSTVQVFTDSEYQLPYVLGSAHQGCLPPFPADVFMVPQYGYLTLNNGSQAVGRSSFYCLEYFPSQMLRTGNNFTFSYTFEDVPFHSSYAHSQSLDRLMNPLIDQYLYYLSRTNTPSGTTTQSRLQFSQAGASDIRDQSRNWLPGPCYRQQRVSKTSADNNNSEYSWTGATKYHLNGRDSLVNPGPAMASHKDDEEKFFPQSGVLIFGKQGSEKTNVDIEKVMITDEEEIRTTNPVATEQYGSVSTNLQRGNAAAGSTPPPMAARQAATADVNTQGVLPGMVWQDRDVYLQGPIWAKIPHTDGHFHPSPLMGGFGLKHPPPQILIKNTPVPANPSTTFSAAKFASFITQYSTGQVSVEIEWELQKENSKRWNPEIQYTSNYNKSVNVDFTVDTNGVYSEPRPIGTRYLTRNL

SEQ ID NO: 1261 - protein, 747 aa, Artificial Sequence
  source: /note="Description of Artificial Sequence: Synthetic polypeptide"
MAADGYLPDWLEDTLSEGIRQWWKLKPGPPPPKPAERHKDDSRGLVLPGYKYLGPFNGLDKGEPVNEADAAALEHDKAYDRQLDSGDNPYLKYNHADAEFQERLKEDTSFGGNLGRAVFQAKKRVLEPLGLVEEPVKTAPGKKRPVEHSPVEPDSSSGTGKAGQQPARKRLNFGQTGDADSVPDPQPLGQPPAAPSGLGTNTMATGSGAPMADNNEGADGVGNSSGNWHCDSTWMGDRVITTSTRTWALPTYNNHLYKQISSQSGASNDNHYFGYSTPWGYFDFNRFHCHFSPRDWQRLINNNWGFRPKRLNFKLFNIQVKEVTQNDGTTTIANNLTSTVQVFTDSEYQLPYVLGSAHQGCLPPFPADVFMVPQYGYLTLNNGSQAVGRSSFYCLEYFPSQMLRTGNNFTFSYTFEDVPFHSSYAHSQSLDRLMNPLIDQYLYYLSRTNTPSGTTTQSRLQFSQAGASDIRDQSRNWLPGPCYRQQRVSKTSADNNNSEYSWTGATKYHLNGRDSLVNPGPAMASHKDDEEKFFPQSGVLIFGKQGSEKTNVDIEKVMITDEEEIRTTNPVATEQYGSVSTNLQRGNAAAGETRAPLAARQAATADVNTQGVLPGMVWQDRDVYLQGPIWAKIPHTDGHFHPSPLMGGFGLKHPPPQILIKNTPVPANPSTTFSAAKFASFITQYSTGQVSVEIEWELQKENSKRWNPEIQYTSNYNKSVNVDFTVDTNGVYSEPRPIGTRYLTRNL

SEQ ID NO: 1262 - protein, 7 aa, Artificial Sequence
  source: /note="Description of Artificial Sequence: Synthetic peptide"
TLAVPFK

SEQ ID NO: 1263 - protein, 7 aa, Artificial Sequence
  source: /note="Description of Artificial Sequence: Synthetic peptide"
KFPVALT

SEQ ID NO: 1264 - protein, 6 aa, Artificial Sequence
  source: /note="Description of Artificial Sequence: Synthetic peptide"
LAVPFK

SEQ ID NO: 1265 - protein, 5 aa, Artificial Sequence
  source: /note="Description of Artificial Sequence: Synthetic peptide"
AVPFK

SEQ ID NO: 1266 - protein, 4 aa, Artificial Sequence
  source: /note="Description of Artificial Sequence: Synthetic peptide"
VPFK

SEQ ID NO: 1267 - protein, 6 aa, Artificial Sequence
  source: /note="Description of Artificial Sequence: Synthetic peptide"
TLAVPF

SEQ ID NO: 1268 - protein, 5 aa, Artificial Sequence
  source: /note="Description of Artificial Sequence: Synthetic peptide"
TLAVP

SEQ ID NO: 1269 - protein, 4 aa, Artificial Sequence
  source: /note="Description of Artificial Sequence: Synthetic peptide"
TLAV

SEQ ID NO: 1270 - protein, 7 aa, Artificial Sequence
  source: /note="Description of Artificial Sequence: Synthetic peptide"
SVSKPFL

SEQ ID NO: 1271 - protein, 7 aa, Artificial Sequence
  source: /note="Description of Artificial Sequence: Synthetic peptide"
FTLTTPK

SEQ ID NO: 1272 - protein, 7 aa, Artificial Sequence
  source: /note="Description of Artificial Sequence: Synthetic peptide"
MNATKNV

SEQ ID NO: 1273 - protein, 7 aa, Artificial Sequence
  source: /note="Description of Artificial Sequence: Synthetic peptide"
QSSQTPR

SEQ ID NO: 1274 - protein, 7 aa, Artificial Sequence
  source: /note="Description of Artificial Sequence: Synthetic peptide"
ILGTGTS

SEQ ID NO: 1275 - protein, 7 aa, Artificial Sequence
  source: /note="Description of Artificial Sequence: Synthetic peptide"
TRTNPEA

SEQ ID NO: 1276 - protein, 7 aa, Artificial Sequence
  source: /note="Description of Artificial Sequence: Synthetic peptide"
NGGTSSS

SEQ ID NO: 1277 - protein, 7 aa, Artificial Sequence
  source: /note="Description of Artificial Sequence: Synthetic peptide"
YTLSQGW

SEQ ID NO: 1278 - DNA, 21 bp, Artificial Sequence
  source: /note="Description of Artificial Sequence: Synthetic oligonucleotide"
aagtttcctgtggcgttgact

SEQ ID NO: 1279 - DNA, 21 bp, Artificial Sequence
  source: /note="Description of Artificial Sequence: Synthetic oligonucleotide"
actttggcggtgccttttaag

SEQ ID NO: 1280 - DNA, 21 bp, Artificial Sequence
  source: /note="Description of Artificial Sequence: Synthetic oligonucleotide"
agtgtgagtaagccttttttg

SEQ ID NO: 1281 - DNA, 21 bp, Artificial Sequence
  source: /note="Description of Artificial Sequence: Synthetic oligonucleotide"
tttacgttgacgacgcctaag

SEQ ID NO: 1282 - DNA, 21 bp, Artificial Sequence
  source: /note="Description of Artificial Sequence: Synthetic oligonucleotide"
atgaatgctacgaagaatgtg

SEQ ID NO: 1283 - DNA, 21 bp, Artificial Sequence
  source: /note="Description of Artificial Sequence: Synthetic oligonucleotide"
cagtcgtcgcagacgcctagg

SEQ ID NO: 1284 - DNA, 21 bp, Artificial Sequence
  source: /note="Description of Artificial Sequence: Synthetic oligonucleotide"
attctggggactggtacttcg

SEQ ID NO: 1285 - DNA, 21 bp, Artificial Sequence
  source: /note="Description of Artificial Sequence: Synthetic oligonucleotide"
acgcggactaatcctgaggct

SEQ ID NO: 1286 - DNA, 21 bp, Artificial Sequence
  source: /note="Description of Artificial Sequence: Synthetic oligonucleotide"
aatggggggactagtagttct

SEQ ID NO: 1287 - DNA, 21 bp, Artificial Sequence
  source: /note="Description of Artificial Sequence: Synthetic oligonucleotide"
tatactttgtcgcagggttgg

SEQ ID NO: 1288 - protein, 11 aa, Artificial Sequence
  source: /note="Description of Artificial Sequence: Synthetic peptide"
AQTLAVPFKAQ

SEQ ID NO: 1289 - protein, 11 aa, Artificial Sequence
  source: /note="Description of Artificial Sequence: Synthetic peptide"
AQSVSKPFLAQ

SEQ ID NO: 1290 - protein, 11 aa, Artificial Sequence
  source: /note="Description of Artificial Sequence: Synthetic peptide"
AQFTLTTPKAQ

SEQ ID NO: 1291 - protein, 11 aa, Artificial Sequence
  source: /note="Description of Artificial Sequence: Synthetic peptide"
DGTLAVPFKAQ

SEQ ID NO: 1292 - protein, 11 aa, Artificial Sequence
  source: /note="Description of Artificial Sequence: Synthetic peptide"
ESTLAVPFKAQ

SEQ ID NO: 1293 - protein, 11 aa, Artificial Sequence
  source: /note="Description of Artificial Sequence: Synthetic peptide"
GGTLAVPFKAQ

SEQ ID NO: 1294 - protein, 11 aa, Artificial Sequence
  source: /note="Description of Artificial Sequence: Synthetic peptide"
AQTLATPFKAQ

SEQ ID NO: 1295 - protein, 11 aa, Artificial Sequence
  source: /note="Description of Artificial Sequence: Synthetic peptide"
ATTLATPFKAQ

SEQ ID NO: 1296 - protein, 11 aa, Artificial Sequence
  source: /note="Description of Artificial Sequence: Synthetic peptide"
DGTLATPFKAQ

SEQ ID NO: 1297 - protein, 11 aa, Artificial Sequence
  source: /note="Description of Artificial Sequence: Synthetic peptide"
GGTLATPFKAQ

SEQ ID NO: 1298 - protein, 11 aa, Artificial Sequence
  source: /note="Description of Artificial Sequence: Synthetic peptide"
SGSLAVPFKAQ

SEQ ID NO: 1299 - protein, 11 aa, Artificial Sequence
  source: /note="Description of Artificial Sequence: Synthetic peptide"
AQTLAQPFKAQ

SEQ ID NO: 1300 - protein, 11 aa, Artificial Sequence
  source: /note="Description of Artificial Sequence: Synthetic peptide"
AQTLQQPFKAQ

SEQ ID NO: 1301 - protein, 11 aa, Artificial Sequence
  source: /note="Description of Artificial Sequence: Synthetic peptide"
AQTLSNPFKAQ

SEQ ID NO: 1302 - protein, 11 aa, Artificial Sequence
  source: /note="Description of Artificial Sequence: Synthetic peptide"
AQTLAVPFSNP

SEQ ID NO: 1303 - protein, 11 aa, Artificial Sequence
  source: /note="Description of Artificial Sequence: Synthetic peptide"
QGTLAVPFKAQ

SEQ ID NO: 1304 - protein, 11 aa, Artificial Sequence
  source: /note="Description of Artificial Sequence: Synthetic peptide"
NQTLAVPFKAQ

SEQ ID NO: 1305 - protein, 11 aa, Artificial Sequence
  source: /note="Description of Artificial Sequence: Synthetic peptide"
EGSLAVPFKAQ

SEQ ID NO: 1306 - protein, 11 aa, Artificial Sequence
  source: /note="Description of Artificial Sequence: Synthetic peptide"
SGNLAVPFKAQ

SEQ ID NO: 1307 - protein, 11 aa, Artificial Sequence
  source: /note="Description of Artificial Sequence: Synthetic peptide"
EGTLAVPFKAQ

SEQ ID NO: 1308 - protein, 11 aa, Artificial Sequence
  source: /note="Description of Artificial Sequence: Synthetic peptide"
DSTLAVPFKAQ

SEQ ID NO: 1309 - protein, 11 aa, Artificial Sequence
  source: /note="Description of Artificial Sequence: Synthetic peptide"
AVTLAVPFKAQ

SEQ ID NO: 1310 - protein, 11 aa, Artificial Sequence
  source: /note="Description of Artificial Sequence: Synthetic peptide"
AQTLSTPFKAQ

SEQ ID NO: 1311 - protein, 11 aa, Artificial Sequence
  source: /note="Description of Artificial Sequence: Synthetic peptide"
AQTLPQPFKAQ

SEQ ID NO: 1312 - protein, 11 aa, Artificial Sequence
  source: /note="Description of Artificial Sequence: Synthetic peptide"
AQTLSQPFKAQ

SEQ ID NO: 1313 - protein, 11 aa, Artificial Sequence
  source: /note="Description of Artificial Sequence: Synthetic peptide"
AQTLQLPFKAQ

SEQ ID NO: 1314 - protein, 11 aa, Artificial Sequence
  source: /note="Description of Artificial Sequence: Synthetic peptide"
AQTLTMPFKAQ

SEQ ID NO: 1315 - protein, 11 aa, Artificial Sequence
  source: /note="Description of Artificial Sequence: Synthetic peptide"
AQTLTTPFKAQ

SEQ ID NO: 1316 - protein, 11 aa, Artificial Sequence
  source: /note="Description of Artificial Sequence: Synthetic peptide"
AQYTLSQGWAQ

SEQ ID NO: 1317 - protein, 11 aa, Artificial Sequence
  source: /note="Description of Artificial Sequence: Synthetic peptide"
AQMNATKNVAQ

SEQ ID NO: 1318 - protein, 11 aa, Artificial Sequence
  source: /note="Description of Artificial Sequence: Synthetic peptide"
AQVSGGHHSAQ

SEQ ID NO: 1319 - protein, 11 aa, Artificial Sequence
  source: /note="Description of Artificial Sequence: Synthetic peptide"
AQTLTAPFKAQ

SEQ ID NO: 1320 - protein, 11 aa, Artificial Sequence
  source: /note="Description of Artificial Sequence: Synthetic peptide"
AQTLSKPFKAQ

SEQ ID NO: 1321 - protein, 7 aa, Artificial Sequence
  source: /note="Description of Artificial Sequence: Synthetic peptide"
QAVRTSL

SEQ ID NO: 1322 - protein, 7 aa, Artificial Sequence
  source: /note="Description of Artificial Sequence: Synthetic peptide"
LAKERLS

SEQ ID NO: 1323 - protein, 7 aa, Artificial Sequence
  source: /note="Description of Artificial Sequence: Synthetic peptide"
MNSTKNV

SEQ ID NO: 1324 - protein, 7 aa, Artificial Sequence
  source: /note="Description of Artificial Sequence: Synthetic peptide"
VSGGHHS

SEQ ID NO: 1325 - protein, 14 aa, Artificial Sequence
  source: /note="Description of Artificial Sequence: Synthetic peptide"
SAQTLAVPFKAQAQ

SEQ ID NO: 1326 - protein, 14 aa, Artificial Sequence
  source: /note="Description of Artificial Sequence: Synthetic peptide"
  MOD_RES (2)..(4): Any amino acid
SXXXLAVPFKAQAQ

SEQ ID NO: 1327 - protein, 14 aa, Artificial Sequence
  source: /note="Description of Artificial Sequence: Synthetic peptide"
  MOD_RES (4)..(6): Any amino acid
SAQXXXVPFKAQAQ

SEQ ID NO: 1328 - protein, 14 aa, Artificial Sequence
  source: /note="Description of Artificial Sequence: Synthetic peptide"
  MOD_RES (6)..(8): Any amino acid
SAQTLXXXFKAQAQ

SEQ ID NO: 1329 - protein, 14 aa, Artificial Sequence
  source: /note="Description of Artificial Sequence: Synthetic peptide"
  MOD_RES (8)..(10): Any amino acid
SAQTLAVXXXAQAQ

SEQ ID NO: 1330 - protein, 14 aa, Artificial Sequence
  source: /note="Description of Artificial Sequence: Synthetic peptide"
  MOD_RES (10)..(12): Any amino acid
SAQTLAVPFXXXAQ

SEQ ID NO: 1331 - protein, 7 aa, Artificial Sequence
  source: /note="Description of Artificial Sequence: Synthetic peptide"
TNHQSAQ

SEQ ID NO: 1332 - protein, 7 aa, Artificial Sequence
  source: /note="Description of Artificial Sequence: Synthetic peptide"
AQAQTGW

SEQ ID NO: 1333 - protein, 9 aa, Artificial Sequence
  source: /note="Description of Artificial Sequence: Synthetic peptide"
DGTLATPFK

SEQ ID NO: 1334 - protein, 11 aa, Artificial Sequence
  source: /note="Description of Artificial Sequence: Synthetic peptide"
  MOD_RES (10)..(11): Any amino acid
DGTLATPFKXX

SEQ ID NO: 1335 - protein, 8 aa, Artificial Sequence
  source: /note="Description of Artificial Sequence: Synthetic peptide"
LAVPFKAQ

SEQ ID NO: 1336 - protein, 6 aa, Artificial Sequence
  source: /note="Description of Artificial Sequence: Synthetic peptide"
VPFKAQ

SEQ ID NO: 1337 - protein, 4 aa, Artificial Sequence
  source: /note="Description of Artificial Sequence: Synthetic peptide"
FKAQ

SEQ ID NO: 1338 - protein, 6 aa, Artificial Sequence
  source: /note="Description of Artificial Sequence: Synthetic peptide"
AQTLAV

SEQ ID NO: 1339 - protein, 8 aa, Artificial Sequence
  source: /note="Description of Artificial Sequence: Synthetic peptide"
AQTLAVPF

SEQ ID NO: 1340 - protein, 4 aa, Artificial Sequence
  source: /note="Description of Artificial Sequence: Synthetic peptide"
QAVR

SEQ ID NO: 1341 - protein, 4 aa, Artificial Sequence
  source: /note="Description of Artificial Sequence: Synthetic peptide"
AVRT

SEQ ID NO: 1342 - protein, 4 aa, Artificial Sequence
  source: /note="Description of Artificial Sequence: Synthetic peptide"
VRTS

SEQ ID NO: 1343 - protein, 4 aa, Artificial Sequence
  source: /note="Description of Artificial Sequence: Synthetic peptide"
RTSL

SEQ ID NO: 1344 - protein, 5 aa, Artificial Sequence
  source: /note="Description of Artificial Sequence: Synthetic peptide"
QAVRT

SEQ ID NO: 1345 - protein, 5 aa, Artificial Sequence
  source: /note="Description of Artificial Sequence: Synthetic peptide"
AVRTS

SEQ ID NO: 1346 - protein, 5 aa, Artificial Sequence
  source: /note="Description of Artificial Sequence: Synthetic peptide"
VRTSL

SEQ ID NO: 1347 - protein, 6 aa, Artificial Sequence
  source: /note="Description of Artificial Sequence: Synthetic peptide"
QAVRTS

SEQ ID NO: 1348 - protein, 6 aa, Artificial Sequence
  source: /note="Description of Artificial Sequence: Synthetic peptide"
AVRTSL

SEQ ID NO: 1349 - DNA, 33 bp, Artificial Sequence
  source: /note="Description of Artificial Sequence: Synthetic oligonucleotide"
gatgggactttggcggtgccttttaaggcacag

SEQ ID NO: 1350 - DNA, 33 bp, Artificial Sequence
  source: /note="Description of Artificial Sequence: Synthetic oligonucleotide"
gatgggacgttggcggtgccttttaaggcacag

SEQ ID NO: 1351 - DNA, 21 bp, Artificial Sequence
  source: /note="Description of Artificial Sequence: Synthetic oligonucleotide"
caggcggttaggacgtctttg

SEQ ID NO: 1352 - DNA, 27 bp, Artificial Sequence
  source: /note="Description of Artificial Sequence: Synthetic oligonucleotide"
caggtcttcacggactcagactatcag

SEQ ID NO: 1353 - DNA, 32 bp, Artificial Sequence
  source: /note="Description of Artificial Sequence: Synthetic oligonucleotide"
caagtaaaacctctacaaatgtggtaaaatcg

SEQ ID NO: 1354 - DNA, 36 bp, Artificial Sequence
  source: /note="Description of Artificial Sequence: Synthetic oligonucleotide"
actcatcgaccaatacttgtactatctctctagaac

SEQ ID NO: 1355 - DNA, 26 bp, Artificial Sequence
  source: /note="Description of Artificial Sequence: Synthetic oligonucleotide"
ggaagtattccttggttttgaaccca

SEQ ID NO: 1356 - DNA, 23 bp, Artificial Sequence
  source: /note="Description of Artificial Sequence: Synthetic oligonucleotide"
ggtcgcggttcttgtttgtggat

SEQ ID NO: 1357 - DNA, 24 bp, Artificial Sequence
  source: /note="Description of Artificial Sequence: Synthetic oligonucleotide"
cgaccttgaagcgcatgaactcct

SEQ ID NO: 1358 - DNA, 83 bp, Artificial Sequence
  source: /note="Description of Artificial Sequence: Synthetic oligonucleotide"
  modified_base (42)..(43): a, c, t, or g
  modified_base (45)..(46): a, c, t, or g
  modified_base (48)..(49): a, c, t, or g
  modified_base (51)..(52): a, c, t, or g
  modified_base (54)..(55): a, c, t, or g
  modified_base (57)..(58): a, c, t, or g
  modified_base (60)..(61): a, c, t, or g
gtattccttggttttgaacccaaccggtctgcgcctgtgcmnnmnnmnnmnnmnnmnnmnnttgggcactctggtggtttgtc

SEQ ID NO: 1359 - DNA, 64 bp, Artificial Sequence
  source: /note="Description of Artificial Sequence: Synthetic oligonucleotide"
  modified_base (36)..(37): a, c, t, or g
  modified_base (39)..(40): a, c, t, or g
  modified_base (42)..(43): a, c, t, or g
gtattccttggttttgaacccaaccggtctgcgcmnnmnnmnnaaaaggcaccgccaaagtttg

SEQ ID NO: 1360 - DNA, 70 bp, Artificial Sequence
  source: /note="Description of Artificial Sequence: Synthetic oligonucleotide"
  modified_base (42)..(43): a, c, t, or g
  modified_base (45)..(46): a, c, t, or g
  modified_base (48)..(49): a, c, t, or g
gtattccttggttttgaacccaaccggtctgcgcctgtgcmnnmnnmnncaccgccaaagtttgggcact

SEQ ID NO: 1361 - DNA, 77 bp, Artificial Sequence
  source: /note="Description of Artificial Sequence: Synthetic oligonucleotide"
  modified_base (48)..(49): a, c, t, or g
  modified_base (51)..(52): a, c, t, or g
  modified_base (54)..(55): a, c, t, or g
gtattccttggttttgaacccaaccggtctgcgcctgtgccttaaamnnmnnmnncaaagtttgggcactctggtgg

SEQ ID NO: 1362 - DNA, 83 bp, Artificial Sequence
  source: /note="Description of Artificial Sequence: Synthetic oligonucleotide"
  modified_base (54)..(55): a, c, t, or g
  modified_base (57)..(58): a, c, t, or g
  modified_base (60)..(61): a, c, t, or g
gtattccttggttttgaacccaaccggtctgcgcctgtgccttaaaaggcacmnnmnnmnnttgggcactctggtggtttgtg

SEQ ID NO: 1363 - DNA, 21 bp, Artificial Sequence
  source: /note="Description of Artificial Sequence: Synthetic oligonucleotide"
cttgcgaaggagcggctttcg

SEQ ID NO: 1364 - protein, 10 aa, Artificial Sequence
  source: /note="Description of Artificial Sequence: Synthetic peptide"
VNLTWSRASG

SEQ ID NO: 1365 - protein, 14 aa, Artificial Sequence
  source: /note="Description of Artificial Sequence: Synthetic peptide"
EFCINHRGYWVCGD

SEQ ID NO: 1366 - protein, 11 aa, Artificial Sequence
  source: /note="Description of Artificial Sequence: Synthetic peptide"
EDGQVMDVDLS

SEQ ID NO: 1367 - protein, 9 aa, Artificial Sequence
  source: /note="Description of Artificial Sequence: Synthetic peptide"
EKQRNGTLT

SEQ ID NO: 1368 - protein, 17 aa, Artificial Sequence
  source: /note="Description of Artificial Sequence: Synthetic peptide"
TYQCRVTHPHLPRALMR

SEQ ID NO: 1369 - protein, 14 aa, Artificial Sequence
  source: /note="Description of Artificial Sequence: Synthetic peptide"
RHSTTQPRKTKGSG

SEQ ID NO: 1370 - protein, 13 aa, Artificial Sequence
  source: /note="Description of Artificial Sequence: Synthetic peptide"
DSNPRGVSAYLSR

SEQ ID NO: 1371 - protein, 12 aa, Artificial Sequence
  source: /note="Description of Artificial Sequence: Synthetic peptide"
TITCLWDLAPSK

SEQ ID NO: 1372 - protein, 10 aa, Artificial Sequence
  source: /note="Description of Artificial Sequence: Synthetic peptide"
KTKGSGFFVF

SEQ ID NO: 1373 - protein, 12 aa, Artificial Sequence
  source: /note="Description of Artificial Sequence: Synthetic peptide"
THPHLPRALMRS

SEQ ID NO: 1374 - protein, 23 aa, Artificial Sequence
  source: /note="Description of Artificial Sequence: Synthetic peptide"
GETYQCRVTHPHLPRALMRSTTK

SEQ ID NO: 1375 - protein, 8 aa, Artificial Sequence
  source: /note="Description of Artificial Sequence: Synthetic peptide"
LPRALMRS

SEQ ID NO: 1376 - protein, 8 aa, Artificial Sequence
  source: /note="Description of Artificial Sequence: Synthetic peptide"
INHRGYWV

SEQ ID NO: 1377 - protein, 12 aa, Artificial Sequence
  source: /note="Description of Artificial Sequence: Synthetic peptide"
CDAGSVRTNAPD

SEQ ID NO: 1378 - protein, 17 aa, Artificial Sequence
  source: /note="Description of Artificial Sequence: Synthetic peptide"
AKAVSNLTESRSESLQS

SEQ ID NO: 1379 - protein, 13 aa, Artificial Sequence
  source: /note="Description of Artificial Sequence: Synthetic peptide"
SLTGDEFKKVLET

SEQ ID NO: 1380 - protein, 11 aa, Artificial Sequence
  source: /note="Description of Artificial Sequence: Synthetic peptide"
REAVAYRFEED

SEQ ID NO: 1381 - protein, 10 aa, Artificial Sequence
  source: /note="Description of Artificial Sequence: Synthetic peptide"
INPEIITLDG

SEQ ID NO: 1382 - protein, 15 aa, Artificial Sequence
  source: /note="Description of Artificial Sequence: Synthetic peptide"
DISVTGAPVITATYL

SEQ ID NO: 1383 - protein, 12 aa, Artificial Sequence
  source: /note="Description of Artificial Sequence: Synthetic peptide"
DISVTGAPVITA

SEQ ID NO: 1384 - protein, 17 aa, Artificial Sequence
  source: /note="Description of Artificial Sequence: Synthetic peptide"
PKTVSNLTESSSESVQS

SEQ ID NO: 1385 - protein, 13 aa, Artificial Sequence
  source: /note="Description of Artificial Sequence: Synthetic peptide"
SLMGDEFKAVLET

SEQ ID NO: 1386 - protein, 11 aa, Artificial Sequence
  source: /note="Description of Artificial Sequence: Synthetic peptide"
QHSVAYTFEED

SEQ ID NO: 1387 - protein, 10 aa, Artificial Sequence
  source: /note="Description of Artificial Sequence: Synthetic peptide"
INPEIITRDG

SEQ ID NO: 1388 - protein, 15 aa, Artificial Sequence
  source: /note="Description of Artificial Sequence: Synthetic peptide"
DISLTGDPVITASYL

SEQ ID NO: 1389 - protein, 12 aa, Artificial Sequence
  source: /note="Description of Artificial Sequence: Synthetic peptide"
DISLTGDPVITA

SEQ ID NO: 1390 - protein, 11 aa, Artificial Sequence
  source: /note="Description of Artificial Sequence: Synthetic peptide"
DQSIDFEIDSA

SEQ ID NO: 1391 - protein, 20 aa, Artificial Sequence
  source: /note="Description of Artificial Sequence: Synthetic peptide"
KNVSEDLPLPTFSPTLLGDS

SEQ ID NO: 1392 - protein, 11 aa, Artificial Sequence
  source: /note="Description of Artificial Sequence: Synthetic peptide"
KNVSEDLPLPT

SEQ ID NO: 1393 - protein, 12 aa, Artificial Sequence
  source: /note="Description of Artificial Sequence: Synthetic peptide"
CDSGRVRTDAPD

SEQ ID NO: 1394 - protein, 14 aa, Artificial Sequence
  source: /note="Description of Artificial Sequence: Synthetic peptide"
FPEHLLVDFLQSLS

SEQ ID NO: 1395 - protein, 9 aa, Artificial Sequence
  source: /note="Description of Artificial Sequence: Synthetic peptide"
DAEFRHDSG

SEQ ID NO: 1396 - protein, 16 aa, Artificial Sequence
  source: /note="Description of Artificial Sequence: Synthetic peptide"
HYAAAQWDFGNTMCQL

SEQ ID NO: 1397 - protein, 13 aa, Artificial Sequence
  source: /note="Description of Artificial Sequence: Synthetic peptide"
YAAQWDFGNTMCQ

SEQ ID NO: 1398 - protein, 10 aa, Artificial Sequence
  source: /note="Description of Artificial Sequence: Synthetic peptide"
RSQKEGLHYT

SEQ ID NO: 1399 - protein, 19 aa, Artificial Sequence
  source: /note="Description of Artificial Sequence: Synthetic peptide"
SSRTPSDKPVAHWANPQAE

SEQ ID NO: 1400 - protein, 15 aa, Artificial Sequence
  source: /note="Description of Artificial Sequence: Synthetic peptide"
SRTPSDKPVAHWANP

SEQ ID NO: 1401 - protein, 9 aa, Artificial Sequence
  source: /note="Description of Artificial Sequence: Synthetic peptide"
SSRTPSDKP

SEQ ID NO: 1402 - protein, 14 aa, Artificial Sequence
  source: /note="Description of Artificial Sequence: Synthetic peptide"
NADGNVDYHMNSVP

SEQ ID NO: 1403 - protein, 11 aa, Artificial Sequence
  source: /note="Description of Artificial Sequence: Synthetic peptide"
DGNVDYHMNSV

SEQ ID NO: 1404 - protein, 16 aa, Artificial Sequence
  source: /note="Description of Artificial Sequence: Synthetic peptide"
RSFKEFLQSSLRALRQ

SEQ ID NO: 1405 - protein, 11 aa, Artificial Sequence
  source: /note="Description of Artificial Sequence: Synthetic peptide"
FKEFLQSSLRA

SEQ ID NO: 1406 - protein, 10 aa, Artificial Sequence
  source: /note="Description of Artificial Sequence: Synthetic peptide"
QMWAPQWGPD

SEQ ID NO: 1407 - protein, 6 aa, Artificial Sequence
  source: /note="Description of Artificial Sequence: Synthetic peptide"
RGNRQA

SEQ ID NO: 1408 - protein, 6 aa, Artificial Sequence
  source: /note="Description of Artificial Sequence: Synthetic peptide"
SSSTDP

SEQ ID NO: 1409 - protein, 6 aa, Artificial Sequence
  source: /note="Description of Artificial Sequence: Synthetic peptide"
SSNTAP

SEQ ID NO: 1410 - protein, 6 aa, Artificial Sequence
  source: /note="Description of Artificial Sequence: Synthetic peptide"
SNSNLP

SEQ ID NO: 1411 - protein, 6 aa, Artificial Sequence
  source: /note="Description of Artificial Sequence: Synthetic peptide"
SSTTAP

SEQ ID NO: 1412 - protein, 6 aa, Artificial Sequence
  source: /note="Description of Artificial Sequence: Synthetic peptide"
AANTAA

SEQ ID NO: 1413 - protein, 6 aa, Artificial Sequence
  source: /note="Description of Artificial Sequence: Synthetic peptide"
QQNTAP

SEQ ID NO: 1414 - protein, 6 aa, Artificial Sequence
  source: /note="Description of Artificial Sequence: Synthetic peptide"
SAQAQA

SEQ ID NO: 1415 - protein, 6 aa, Artificial Sequence
  source: /note="Description of Artificial Sequence: Synthetic peptide"
QANTGP

SEQ ID NO: 1416 - protein, 6 aa, Artificial Sequence
  source: /note="Description of Artificial Sequence: Synthetic peptide"
NATTAP

SEQ ID NO: 1417 - protein, 6 aa, Artificial Sequence
  source: /note="Description of Artificial Sequence: Synthetic peptide"
SSTAGP

SEQ ID NO: 1418 - protein, 6 aa, Artificial Sequence
  source: /note="Description of Artificial Sequence: Synthetic peptide"
QQNTAA

SEQ ID NO: 1419 - protein, 6 aa, Artificial Sequence
  source: /note="Description of Artificial Sequence: Synthetic peptide"
PSTAGP

SEQ ID NO: 1420 - protein, 6 aa, Artificial Sequence
  source: /note="Description of Artificial Sequence: Synthetic peptide"
NQNTAP

SEQ ID NO: 1421 - protein, 6 aa, Artificial Sequence
  source: /note="Description of Artificial Sequence: Synthetic peptide"
QAANAP

SEQ ID NO: 1422 - protein, 6 aa, Artificial Sequence
  source: /note="Description of Artificial Sequence: Synthetic peptide"
SIVGLP

SEQ ID NO: 1423 - protein, 6 aa, Artificial Sequence
  source: /note="Description of Artificial Sequence: Synthetic peptide"
AASTAA

SEQ ID NO: 1424 - protein, 6 aa, Artificial Sequence
  source: /note="Description of Artificial Sequence: Synthetic peptide"
SQNTTA

SEQ ID NO: 1425 - protein, 6 aa, Artificial Sequence
  source: /note="Description of Artificial Sequence: Synthetic peptide"
QQDTAP

SEQ ID NO: 1426 - protein, 6 aa, Artificial Sequence
  source: /note="Description of Artificial Sequence: Synthetic peptide"
QTNTGP

SEQ ID NO: 1427 - protein, 6 aa, Artificial Sequence
  source: /note="Description of Artificial Sequence: Synthetic peptide"
QTNGAP

SEQ ID NO: 1428 - protein, 6 aa, Artificial Sequence
  source: /note="Description of Artificial Sequence: Synthetic peptide"
QQNAAP

SEQ ID NO: 1429 - protein, 6 aa, Artificial Sequence
  source: /note="Description of Artificial Sequence: Synthetic peptide"
AANTQA

SEQ ID NO: 1430 - protein, 6 aa, Artificial Sequence
  source: /note="Description of Artificial Sequence: Synthetic peptide"
NGRAHA

SEQ ID NO: 1431 - protein, 7 aa, Artificial Sequence
  source: /note="Description of Artificial Sequence: Synthetic peptide"
QPEHSST

SEQ ID NO: 1432 - protein, 7 aa, Artificial Sequence
  source: /note="Description of Artificial Sequence: Synthetic peptide"
VNTANST

SEQ ID NO: 1433 - protein, 7 aa, Artificial Sequence
  source: /note="Description of Artificial Sequence: Synthetic peptide"
HGPMQKS

SEQ ID NO: 1434 - protein, 7 aa, Artificial Sequence
  source: /note="Description of Artificial Sequence: Synthetic peptide"
PHKPPLA

SEQ ID NO: 1435 - protein, 7 aa, Artificial Sequence
  source: /note="Description of Artificial Sequence: Synthetic peptide"
IKNNEMW

SEQ ID NO: 1436 - protein, 7 aa, Artificial Sequence
  source: /note="Description of Artificial Sequence: Synthetic peptide"
RNLDTPM

SEQ ID NO: 1437 - protein, 7 aa, Artificial Sequence
  source: /note="Description of Artificial Sequence: Synthetic peptide"
VDSHRQS

SEQ ID NO: 1438 - protein, 7 aa, Artificial Sequence
  source: /note="Description of Artificial Sequence: Synthetic peptide"
YDSKTKT

SEQ ID NO: 1439 - protein, 7 aa, Artificial Sequence
  source: /note="Description of Artificial Sequence: Synthetic peptide"
SQLPHQK

SEQ ID NO: 1440 - protein, 7 aa, Artificial Sequence
  source: /note="Description of Artificial Sequence: Synthetic peptide"
STMQQNT

SEQ ID NO: 1441 - protein, 7 aa, Artificial Sequence
  source: /note="Description of Artificial Sequence: Synthetic peptide"
TERYMTQ

SEQ ID NO: 1442 - protein, 7 aa, Artificial Sequence
  source: /note="Description of Artificial Sequence: Synthetic peptide"
DASLSTS

SEQ ID NO: 1443 - protein, 7 aa, Artificial Sequence
  source: /note="Description of Artificial Sequence: Synthetic peptide"
DLPNKKT

SEQ ID NO: 1444 - protein, 7 aa, Artificial Sequence
  source: /note="Description of Artificial Sequence: Synthetic peptide"
DLTAARL

SEQ ID NO: 1445 - protein, 7 aa, Artificial Sequence
  source: /note="Description of Artificial Sequence: Synthetic peptide"
EPHQFNY

SEQ ID NO: 1446 - protein, 7 aa, Artificial Sequence
  source: /note="Description of Artificial Sequence: Synthetic peptide"
EPQSNHT

SEQ ID NO: 1447 - protein, 7 aa, Artificial Sequence
  source: /note="Description of Artificial Sequence: Synthetic peptide"
MSSWPSQ

SEQ ID NO: 1448 - protein, 7 aa, Artificial Sequence
  source: /note="Description of Artificial Sequence: Synthetic peptide"
NPKHNAT

SEQ ID NO: 1449 - protein, 7 aa, Artificial Sequence
  source: /note="Description of Artificial Sequence: Synthetic peptide"
PDGMRTT

SEQ ID NO: 1450 - protein, 7 aa, Artificial Sequence
  source: /note="Description of Artificial Sequence: Synthetic peptide"
PNNNKTT

SEQ ID NO: 1451 - protein, 7 aa, Artificial Sequence
  source: /note="Description of Artificial Sequence: Synthetic peptide"
QSTTHDS

SEQ ID NO: 1452 - protein, 7 aa, Artificial Sequence
  source: /note="Description of Artificial Sequence: Synthetic peptide"
TGSKQKQ

SEQ ID NO: 1453 - protein, 7 aa, Artificial Sequence
  source: /note="Description of Artificial Sequence: Synthetic peptide"
SLKHQAL

SEQ ID NO: 1454 - protein, 7 aa, Artificial Sequence
  source: /note="Description of Artificial Sequence: Synthetic peptide"
SPIDGEQ

SEQ ID NO: 1455 - protein, 8 aa, Artificial Sequence
  source: /note="Description of Artificial Sequence: Synthetic peptide"
WIFPWIQL

SEQ ID NO: 1456 - protein, 9 aa, Artificial Sequence
  source: /note="Description of Artificial Sequence: Synthetic peptide"
CDCRGDCFC

SEQ ID NO: 1457 - protein, 5 aa, Artificial Sequence
  source: /note="Description of Artificial Sequence: Synthetic peptide"
CNGRC

SEQ ID NO: 1458 - protein, 7 aa, Artificial Sequence
  source: /note="Description of Artificial Sequence: Synthetic peptide"
CPRECES

SEQ ID NO: 1459 - protein, 10 aa, Artificial Sequence
  source: /note="Description of Artificial Sequence: Synthetic peptide"
CTTHWGFTLC

SEQ ID NO: 1460 - protein, 9 aa, Artificial Sequence
  source: /note="Description of Artificial Sequence: Synthetic peptide"
CGRRAGGSC

SEQ ID NO: 1461 - protein, 9 aa, Artificial Sequence
  source: /note="Description of Artificial Sequence: Synthetic peptide"
CKGGRAKDC

SEQ ID NO: 1462 - protein, 9 aa, Artificial Sequence
  source: /note="Description of Artificial Sequence: Synthetic peptide"
CVPELGHEC

SEQ ID NO: 1463 - protein, 9 aa, Artificial Sequence
  source: /note="Description of Artificial Sequence: Synthetic peptide"
CRRETAWAK

SEQ ID NO: 1464 - protein, 14 aa, Artificial Sequence
  source: /note="Description of Artificial Sequence: Synthetic peptide"
VSWFSHRYSPFAVS

SEQ ID NO: 1465 - protein, 13 aa, Artificial Sequence
  source: /note="Description of Artificial Sequence: Synthetic peptide"
GYRDGYAGPILYN

SEQ ID NO: 1466 - protein, 7 aa, Artificial Sequence
  source: /note="Description of Artificial Sequence: Synthetic peptide"
  MOD_RES (1)..(3): Any amino acid
  MOD_RES (5)..(7): Any amino acid
XXXYXXX

SEQ ID NO: 1467 - protein, 4 aa, Artificial Sequence
  source: /note="Description of Artificial Sequence: Synthetic peptide"
  VARIANT (2)..(2): /replace="Met"
  SITE (1)..(4): /note="Variant residues given in the sequence have no preference with respect to those in the annotations for variant positions"
YENW

SEQ ID NO: 1468 - protein, 7 aa, Artificial Sequence
  source: /note="Description of Artificial Sequence: Synthetic peptide"
RPLPPLP

SEQ ID NO: 1469 - protein, 7 aa, Artificial Sequence
  source: /note="Description of Artificial Sequence: Synthetic peptide"
APPLPPR

SEQ ID NO: 1470 - protein, 12 aa, Artificial Sequence
  source: /note="Description of Artificial Sequence: Synthetic peptide"
DVFYPYPYASGS

SEQ ID NO: 1471 - protein, 6 aa, Artificial Sequence
  source: /note="Description of Artificial Sequence: Synthetic peptide"
MYWYPY

SEQ ID NO: 1472 - protein, 12 aa, Artificial Sequence
  source: /note="Description of Artificial Sequence: Synthetic peptide"
DITWDQLWDLMK

SEQ ID NO: 1473 - protein, 8 aa, Artificial Sequence
  source: /note="Description of Artificial Sequence: Synthetic peptide"
  VARIANT (5)..(5): /replace="Leu"
  SITE (1)..(8): /note="Variant residues given in the sequence have no preference with respect to those in the annotations for variant positions"
CWDDGWLC

SEQ ID NO: 1474 - protein, 14 aa, Artificial Sequence
  source: /note="Description of Artificial Sequence: Synthetic peptide"
EWCEYLGGYLRCYA

SEQ ID NO: 1475 - protein, 14 aa, Artificial Sequence
  source: /note="Description of Artificial Sequence: Synthetic peptide"
  MOD_RES (2)..(2): Any amino acid
  MOD_RES (4)..(5): Any amino acid
  MOD_RES (8)..(8): Any amino acid
  MOD_RES (11)..(11): Any amino acid
  MOD_RES (13)..(13): Any amino acid
YXCXXGPXTWXCXP

SEQ ID NO: 1476 - protein, 14 aa, Artificial Sequence
  source: /note="Description of Artificial Sequence: Synthetic peptide"
IEGPTLRQWLAARA

SEQ ID NO: 1477 - protein, 5 aa, Artificial Sequence
  source: /note="Description of Artificial Sequence: Synthetic peptide"
  MOD_RES (3)..(4): Any amino acid
  VARIANT (5)..(5): /replace="Trp" or "Phe" or "His"
  SITE (1)..(5): /note="Variant residues given in the sequence have no preference with respect to those in the annotations for variant positions"
LWXXY

SEQ ID NO: 1478 - protein, 7 aa, Artificial Sequence
  source: /note="Description of Artificial Sequence: Synthetic peptide"
  MOD_RES (1)..(1): Any amino acid
  MOD_RES (3)..(4): Any amino acid
XFXXYLW

SEQ ID NO: 1479 - protein, 13 aa, Artificial Sequence
  source: /note="Description of Artificial Sequence: Synthetic peptide"
SSIISHFRWGLCD

SEQ ID NO: 1480 - protein, 13 aa, Artificial Sequence
  source: /note="Description of Artificial Sequence: Synthetic peptide"
MSRPACPPNDKYE

SEQ ID NO: 1481 - protein, 8 aa, Artificial Sequence
  source: /note="Description of Artificial Sequence: Synthetic peptide"
CLRSGRGC

SEQ ID NO: 1482 - protein, 9 aa, Artificial Sequence
  source: /note="Description of Artificial Sequence: Synthetic peptide"
CHWMFSPWC

SEQ ID NO: 1483 - protein, 4 aa, Artificial Sequence
  source: /note="Description of Artificial Sequence: Synthetic peptide"
  MOD_RES (2)..(3): Any amino acid
WXXF

SEQ ID NO: 1484 - protein, 8 aa, Artificial Sequence
  source: /note="Description of Artificial Sequence: Synthetic peptide"
CSSRLDAC

SEQ ID NO: 1485 - protein, 7 aa, Artificial Sequence
  source: /note="Description of Artificial Sequence: Synthetic peptide"
CLPVASC

SEQ ID NO: 1486 - protein, 13 aa, Artificial Sequence
  source: /note="Description of Artificial Sequence: Synthetic peptide"
CGFECVRQCPERC

SEQ ID NO: 1487 - protein, 13 aa, Artificial Sequence
  source: /note="Description of Artificial Sequence: Synthetic peptide"
CVALCREACGEGC

SEQ ID NO: 1488 - protein, 9 aa, Artificial Sequence
  source: /note="Description of Artificial Sequence: Synthetic peptide"
SWCEPGWCR

SEQ ID NO: 1489 - protein, 7 aa, Artificial Sequence
  source: /note="Description of Artificial Sequence: Synthetic peptide"
YSGKWGW

SEQ ID NO: 1490 - protein, 7 aa, Artificial Sequence
  source: /note="Description of Artificial Sequence: Synthetic peptide"
GLSGGRS

SEQ ID NO: 1491 - protein, 7 aa, Artificial Sequence
  source: /note="Description of Artificial Sequence: Synthetic peptide"
LMLPRAD

SEQ ID NO: 1492 - protein, 9 aa, Artificial Sequence
  source: /note="Description of Artificial Sequence: Synthetic peptide"
CSCFRDVCC

SEQ ID NO: 1493 - protein, 9 aa, Artificial Sequence
  source: /note="Description of Artificial Sequence: Synthetic peptide"
CRDVVSVIC

SEQ ID NO: 1494 - protein, 6 aa, Artificial Sequence
  source: /note="Description of Artificial Sequence: Synthetic peptide"
MARSGL

SEQ ID NO: 1495 - protein, 6 aa, Artificial Sequence
  source: /note="Description of Artificial Sequence: Synthetic peptide"
MARAKE

SEQ ID NO: 1496 - protein, 6 aa, Artificial Sequence
  source: /note="Description of Artificial Sequence: Synthetic peptide"
MSRTMS

SEQ ID NO: 1497 - protein, 6 aa, Artificial Sequence
  source: /note="Description of Artificial Sequence: Synthetic peptide"
KCCYSL

SEQ ID NO: 1498 - protein, 14 aa, Artificial Sequence
  source: /note="Description of Artificial Sequence: Synthetic peptide"
MYWGDSHWLQYWYE

SEQ ID NO: 1499 - protein, 7 aa, Artificial Sequence
  source: /note="Description of Artificial Sequence: Synthetic peptide"
MQLPLAT

SEQ ID NO: 1500 - protein, 4 aa, Artificial Sequence
  source: /note="Description of Artificial Sequence: Synthetic peptide"
EWLS

SEQ ID NO: 1501 - protein, 4 aa, Artificial Sequence
  source: /note="Description of Artificial Sequence: Synthetic peptide"
SNEW

SEQ ID NO: 1502 - protein, 4 aa, Artificial Sequence
  source: /note="Description of Artificial Sequence: Synthetic peptide"
TNYL

SEQ ID NO: 1503 - protein, 12 aa, Artificial Sequence
  source: /note="Description of Artificial Sequence: Synthetic peptide"
WDLAWMFRLPVG

SEQ ID NO: 1504 - protein, 13 aa, Artificial Sequence
  source: /note="Description of Artificial Sequence: Synthetic peptide"
CTVALPGGYVRVC

SEQ ID NO: 1505 - protein, 13 aa, Artificial Sequence
  source: /note="Description of Artificial Sequence: Synthetic peptide"
CVAYCIEHHCWTC

SEQ ID NO: 1506 - protein, 12 aa, Artificial Sequence
  source: /note="Description of Artificial Sequence: Synthetic peptide"
CVFAHNYDYLVC

SEQ ID NO: 1507 - protein, 10 aa, Artificial Sequence
  source: /note="Description of Artificial Sequence: Synthetic peptide"
CVFTSNYAFC

SEQ ID NO: 1508 - protein, 7 aa, Artificial Sequence
  source: /note="Description of Artificial Sequence: Synthetic peptide"
VHSPNKK

SEQ ID NO: 1509 - protein, 7 aa, Artificial Sequence
  source: /note="Description of Artificial Sequence: Synthetic peptide"
CRGDGWC

SEQ ID NO: 1510 - protein, 6 aa, Artificial Sequence
  source: /note="Description of Artificial Sequence: Synthetic peptide"
  MOD_RES (1)..(1): Any amino acid
  MOD_RES (6)..(6): Any amino acid
XRGCDX

SEQ ID NO: 1511 - protein, 4 aa, Artificial Sequence
  source: /note="Description of Artificial Sequence: Synthetic peptide"
  MOD_RES (2)..(3): Any amino acid
  VARIANT (4)..(4): /replace="Thr"
  SITE (1)..(4): /note="Variant residues given in the sequence have no preference with respect to those in the annotations for variant positions"
PXXS

SEQ ID NO: 1512 - protein, 11 aa, Artificial Sequence
  source: /note="Description of Artificial Sequence: Synthetic peptide"
SGKGPRQITAL

SEQ ID NO: 1513 - protein, 14 aa, Artificial Sequence
  source: /note="Description of Artificial Sequence: Synthetic peptide"
  VARIANT (10)..(10): /replace="Gln"
  VARIANT (11)..(11): /replace="Ala"
  VARIANT (12)..(12): /replace="Tyr"
  VARIANT (13)..(13): /replace="Val" or "Met" or "Arg"
  VARIANT (14)..(14): /replace="Lys"
  SITE (1)..(14): /note="Variant residues given in the sequence have no preference with respect to those in the annotations for variant positions"
AAAAAAAAAANLTR

SEQ ID NO: 1514 - protein, 6 aa, Artificial Sequence
  source: /note="Description of Artificial Sequence: Synthetic peptide"
VYMSPF

SEQ ID NO: 1515 - protein, 7 aa, Artificial Sequence
  source: /note="Description of Artificial Sequence: Synthetic peptide"
ATWLPPR

SEQ ID NO: 1516 - protein, 12 aa, Artificial Sequence
  source: /note="Description of Artificial Sequence: Synthetic peptide"
HTMYYHHYQHHL

SEQ ID NO: 1517 - protein, 19 aa, Artificial Sequence
  source: /note="Description of Artificial Sequence: Synthetic peptide"
SEVGCRAGPLQWLCEKYFG

SEQ ID NO: 1518 - protein, 18 aa, Artificial Sequence
  source: /note="Description of Artificial Sequence: Synthetic peptide"
CGLLPVGRPDRNVWRWLC

SEQ ID NO: 1519 - protein, 15 aa, Artificial Sequence
  source: /note="Description of Artificial Sequence: Synthetic peptide"
CKGQCDRFKGLPWEC

SEQ ID NO: 1520 - protein, 5 aa, Artificial Sequence
  source: /note="Description of Artificial Sequence: Synthetic peptide"
SGRSA

SEQ ID NO: 1521 - protein, 4 aa, Artificial Sequence
  source: /note="Description of Artificial Sequence: Synthetic peptide"
WGFP

SEQ ID NO: 1522 - protein, 17 aa, Artificial Sequence
  source: /note="Description of Artificial Sequence: Synthetic peptide"
AEPMPHSLNFSQYLWYT

SEQ ID NO: 1523 - protein, 6 aa, Artificial Sequence
  source: /note="Description of Artificial Sequence: Synthetic peptide"
  VARIANT (4)..(4): /replace="Phe"
  SITE (1)..(6): /note="Variant residues given in the sequence have no preference with respect to those in the annotations for variant positions"
WAYWSP

SEQ ID NO: 1524 - protein, 7 aa, Artificial Sequence
  source: /note="Description of Artificial Sequence: Synthetic peptide"
IELLQAR

SEQ ID NO: 1525 - protein, 16 aa, Artificial Sequence
  source: /note="Description of Artificial Sequence: Synthetic peptide"
AYTKCSRQWRTCMTTH

SEQ ID NO: 1526 - protein, 15 aa, Artificial Sequence
  source: /note="Description of Artificial Sequence: Synthetic peptide"
PQNSKIPGPTFLDPH

SEQ ID NO: 1527 - protein, 15 aa, Artificial Sequence
  source: /note="Description of Artificial Sequence: Synthetic peptide"
SMEPALPDWWWKMFK

SEQ ID NO: 1528 - protein, 16 aa, Artificial Sequence
  source: /note="Description of Artificial Sequence: Synthetic peptide"
ANTPCGPYTHDCPVKR

SEQ ID NO: 1529 - protein, 12 aa, Artificial Sequence
  source: /note="Description of Artificial Sequence: Synthetic peptide"
TACHQHVRMVRP

SEQ ID NO: 1530 - protein, 12 aa, Artificial Sequence
  source: /note="Description of Artificial Sequence: Synthetic peptide"
VPWMEPAYQRFL

SEQ ID NO: 1531 - protein, 8 aa, Artificial Sequence
  source: /note="Description of Artificial Sequence: Synthetic peptide"
DPRATPGS

SEQ ID NO: 1532 - protein, 12 aa, Artificial Sequence
  source: /note="Description of Artificial Sequence: Synthetic peptide"
FRPNRAQDYNTN

SEQ ID NO: 1533 - protein, 9 aa, Artificial Sequence
  source: /note="Description of Artificial Sequence: Synthetic peptide"
CTKNSYLMC

SEQ ID NO: 1534 - protein, 11 aa, Artificial Sequence
  source: /note="Description of Artificial Sequence: Synthetic peptide"
  VARIANT (2)..(2): /replace="Arg"
  VARIANT (3)..(3): /replace="Arg"
  VARIANT (5)..(5): /replace="Asn"
  MOD_RES (6)..(7): Any amino acid
  VARIANT (9)..(9): /replace="Val"
  SITE (1)..(11): /note="Variant residues given in the sequence have no preference with respect to those in the annotations for variant positions"
CQLTGXXGAGC

SEQ ID NO: 1535 - protein, 9 aa, Artificial Sequence
  source: /note="Description of Artificial Sequence: Synthetic peptide"
CPIEDRPMC

SEQ ID NO: 1536 - protein, 12 aa, Artificial Sequence
  source: /note="Description of Artificial Sequence: Synthetic peptide"
HEWSYLAPYPWF

SEQ ID NO: 1537 - protein, 9 aa, Artificial Sequence
  source: /note="Description of Artificial Sequence: Synthetic peptide"
MCPKHPLGC

SEQ ID NO: 1538 - protein, 15 aa, Artificial Sequence
  source: /note="Description of Artificial Sequence: Synthetic peptide"
RMWPSSTVNLSAGRR

SEQ ID NO: 1539 - protein, 20 aa, Artificial Sequence
  source: /note="Description of Artificial Sequence: Synthetic peptide"
SAKTAVSQRVWLPSHRGGEP

SEQ ID NO: 1540 - protein, 20 aa, Artificial Sequence
  source: /note="Description of Artificial Sequence: Synthetic peptide"
KSREHVNNSACPSKRITAAL

SEQ ID NO: 1541 - protein, 4 aa, Artificial Sequence
  source: /note="Description of Artificial Sequence: Synthetic peptide"
EGFR

SEQ ID NO: 1542 - protein, 6 aa, Artificial Sequence
  source: /note="Description of Artificial Sequence: Synthetic peptide"
AGLGVR

SEQ ID NO: 1543 - protein, 15 aa, Artificial Sequence
  source: /note="Description of Artificial Sequence: Synthetic peptide"
GTRQGHTMRLGVSDG

SEQ ID NO: 1544 - protein, 15 aa, Artificial Sequence
  source: /note="Description of Artificial Sequence: Synthetic peptide"
IAGLATPGWSHWLAL

SEQ ID NO: 1545 - protein, 7 aa, Artificial Sequence
  source: /note="Description of Artificial Sequence: Synthetic peptide"
SMSIARL

SEQ ID NO: 1546 - protein, 7 aa, Artificial Sequence
  source: /note="Description of Artificial Sequence: Synthetic peptide"
HTFEPGV

SEQ ID NO: 1547 - protein, 15 aa, Artificial Sequence
  source: /note="Description of Artificial Sequence: Synthetic peptide"
NTSLKRISNKRIRRK

SEQ ID NO: 1548 - protein, 15 aa, Artificial Sequence
  source: /note="Description of Artificial Sequence: Synthetic peptide"
LRIKRKRRKRKKTRK

SEQ ID NO: 1549 - DNA, 21 bp, Adeno-associated virus 2
agcvvmdcaggarscascaac

SEQ ID NO: 1550 - protein, 7 aa, Artificial Sequence
  source: /note="Description of Artificial Sequence: Synthetic peptide"
SDSGASN

SEQ ID NO: 1551 - protein, 7 aa, Artificial Sequence
  source: /note="Description of Artificial Sequence: Synthetic peptide"
SPSGASN

SEQ ID NO: 1552 - protein, 7 aa, Artificial Sequence
  source: /note="Description of Artificial Sequence: Synthetic peptide"
SHSGASN

SEQ ID NO: 1553 - protein, 7 aa, Artificial Sequence
  source: /note="Description of Artificial Sequence: Synthetic peptide"
SRSGASN

SEQ ID NO: 1554 - protein, 7 aa, Artificial Sequence
  source: /note="Description of Artificial Sequence: Synthetic peptide"
SKSGASN

SEQ ID NO: 1555 - protein, 7 aa, Artificial Sequence
  source: /note="Description of Artificial Sequence: Synthetic peptide"
SNSGASN

SEQ ID NO: 1556 - protein, 7 aa, Artificial Sequence
  source: /note="Description of Artificial Sequence: Synthetic peptide"
SGSGASN

SEQ ID NO: 1557 - protein, 7 aa, Artificial Sequence
  source: /note="Description of Artificial Sequence: Synthetic peptide"
SASGASN

SEQ ID NO: 1558 - protein, 7 aa, Artificial Sequence
  source: /note="Description of Artificial Sequence: Synthetic peptide"
SESGTSN

SEQ ID NO: 1559 - protein, 7 aa, Artificial Sequence
  source: /note="Description of Artificial Sequence: Synthetic peptide"
STTGGSN

SEQ ID NO: 1560 - protein, 7 aa, Artificial Sequence
  source: /note="Description of Artificial Sequence: Synthetic peptide"
SSAGSTN

SEQ ID NO: 1561 - protein, 6 aa, Artificial Sequence
  source: /note="Description of Artificial Sequence: Synthetic peptide"
NNDSQA

SEQ ID NO: 1562 - protein, 6 aa, Artificial Sequence
  source: /note="Description of Artificial Sequence: Synthetic peptide"
NNRNQA

SEQ ID NO: 1563 - protein, 6 aa, Artificial Sequence
  source: /note="Description of Artificial Sequence: Synthetic peptide"
NNNKQA

SEQ ID NO: 1564 - protein, 6 aa, Artificial Sequence
  source: /note="Description of Artificial Sequence: Synthetic peptide"
NAKRQA

SEQ ID NO: 1565 - protein, 6 aa, Artificial Sequence
  source: /note="Description of Artificial Sequence: Synthetic peptide"
NDEHQA

SEQ ID NO: 1566 - protein, 6 aa, Artificial Sequence
  source: /note="Description of Artificial Sequence: Synthetic peptide"
NTSQKA

SEQ ID NO: 1567 - protein, 25 aa, Artificial Sequence
  source: /note="Description of Artificial Sequence: Synthetic peptide"
YYLSRTNTPSGTDTQSRLVFSQAGA

SEQ ID NO: 1568 - protein, 25 aa, Artificial Sequence
  source: /note="Description of Artificial Sequence: Synthetic peptide"
YYLSRTNTDSGTETQSGLDFSQAGA

SEQ ID NO: 1569 - protein, 25 aa, Artificial Sequence
  source: /note="Description of Artificial Sequence: Synthetic peptide"
YYLSRTNTESGTPTQSALEFSQAGA

SEQ ID NO: 1570 - protein, 25 aa, Artificial Sequence
  source: /note="Description of Artificial Sequence: Synthetic peptide"
YYLSRTNTHSGTHTQSPLHFSQAGA

SEQ ID NO: 1571 - protein, 25 aa, Artificial Sequence
  source: /note="Description of Artificial Sequence: Synthetic peptide"
YYLSRTNTSSGTITISHLIFSQAGA

SEQ ID NO: 1572 - protein, 25 aa, Artificial Sequence
  source: /note="Description of Artificial Sequence: Synthetic peptide"
YYLSRTNTRSGIMTKSSLMFSQAGA

SEQ ID NO: 1573 - protein, 25 aa, Artificial Sequence
  source: /note="Description of Artificial Sequence: Synthetic peptide"
YYLSRTNTKSGRKTLSNLSFSQAGA

SEQ ID NO: 1574 - protein, 25 aa, Artificial Sequence
  source: /note="Description of Artificial Sequence: Synthetic peptide"
YYLSRTNDGSGPVTPSKLRFSQRGA

SEQ ID NO: 1575 - protein, 25 aa, Artificial Sequence
  source: /note="Description of Artificial Sequence: Synthetic peptide"
YYLSRTNAASGHATHSDLKFSQPGA

SEQ ID NO: 1576 - protein, 25 aa, Artificial Sequence
  source: /note="Description of Artificial Sequence: Synthetic peptide"
YYLSRTNGQAGSLTMSELGFSQVGA

SEQ ID NO: 1577 - protein, 25 aa, Artificial Sequence
  source: /note="Description of Artificial Sequence: Synthetic peptide"
YYLSRTNSTGGNQTTSQLLFSQLSA

SEQ ID NO: 1578 - protein, 25 aa, Artificial Sequence
  source: /note="Description of Artificial Sequence: Synthetic peptide"
YFLSRTNNNTGLNTNSTLNFSQGRA

SEQ ID NO: 1579 - protein, 16 aa, Artificial Sequence
  source: /note="Description of Artificial Sequence: Synthetic peptide"
SKTGADNNNSEYSWTG

SEQ ID NO: 1580 - protein, 16 aa, Artificial Sequence
  source: /note="Description of Artificial Sequence: Synthetic peptide"
SKTDADNNNSEYSWTG

SEQ ID NO: 1581 - protein, 16 aa, Artificial Sequence
  source: /note="Description of Artificial Sequence: Synthetic peptide"
SKTEADNNNSEYSWTG

SEQ ID NO: 1582 - protein, 16 aa, Artificial Sequence
  source: /note="Description of Artificial Sequence: Synthetic peptide"
SKTPADNNNSEYSWTG

SEQ ID NO: 1583 - protein, 16 aa, Artificial Sequence
  source: /note="Description of Artificial Sequence: Synthetic peptide"
SKTHADNNNSEYSWTG

SEQ ID NO: 1584 - protein, 16 aa, Artificial Sequence
  source: /note="Description of Artificial Sequence: Synthetic peptide"
SKTQADNNNSEYSWTG

SEQ ID NO: 1585 - protein, 16 aa, Artificial Sequence
  source: /note="Description of Artificial Sequence: Synthetic peptide"
SKTIADNNNSEYSWTG

SEQ ID NO: 1586 - protein, 16 aa, Artificial Sequence
  source: /note="Description of Artificial Sequence: Synthetic peptide"
SKTMADNNNSEYSWTG

SEQ ID NO: 1587 - protein, 16 aa, Artificial Sequence
  source: /note="Description of Artificial Sequence: Synthetic peptide"
SKTRADNNNSEYSWTG

SEQ ID NO: 1588 - protein, 16 aa, Artificial Sequence
  source: /note="Description of Artificial Sequence: Synthetic peptide"
SKTNADNNNSEYSWTG

SEQ ID NO: 1589 - protein, 16 aa, Artificial Sequence
  source: /note="Description of Artificial Sequence: Synthetic peptide"
SKTVGRNNNSEYSWTG

SEQ ID NO: 1590 - protein, 16 aa, Artificial Sequence
  source: /note="Description of Artificial Sequence: Synthetic peptide"
SKTADRNNNSEYSWTG

SEQ ID NO: 1591 - protein, 16 aa, Artificial Sequence
  source: /note="Description of Artificial Sequence: Synthetic peptide"
SKKLSQNNNSKYSWQG

SEQ ID NO: 1592 - protein, 16 aa, Artificial Sequence
  source: /note="Description of Artificial Sequence: Synthetic peptide"
SKPTTGNNNSDYSWPG

SEQ ID NO: 1593 - protein, 16 aa, Artificial Sequence
  source: /note="Description of Artificial Sequence: Synthetic peptide"
STQKNENNNSNYSWPG

SEQ ID NO: 1594 - protein, 8 aa, Artificial Sequence
  source: /note="Description of Artificial Sequence: Synthetic peptide"
HKDDEGKF

SEQ ID NO: 1595 - protein, 8 aa, Artificial Sequence
  source: /note="Description of Artificial Sequence: Synthetic peptide"
HKDDNRKF

SEQ ID NO: 1596 - protein, 8 aa, Artificial Sequence
  source: /note="Description of Artificial Sequence: Synthetic peptide"
HKDDTNKF

SEQ ID NO: 1597 - protein, 8 aa, Artificial Sequence
  source: /note="Description of Artificial Sequence: Synthetic peptide"
HEDSDKNF

SEQ ID NO: 1598 - protein, 8 aa, Artificial Sequence
  source: /note="Description of Artificial Sequence: Synthetic peptide"
HRDGADSF

SEQ ID NO: 1599 - protein, 8 aa, Artificial Sequence
  source: /note="Description of Artificial Sequence: Synthetic peptide"
HGDNKSRF

SEQ ID NO: 1600 - protein, 14 aa, Artificial Sequence
  source: /note="Description of Artificial Sequence: Synthetic peptide"
KQGSEKTNVDFEEV

SEQ ID NO: 1601 - protein, 14 aa, Artificial Sequence
  source: /note="Description of Artificial Sequence: Synthetic peptide"
KQGSEKTNVDSEEV

SEQ ID NO: 1602 - protein, 14 aa, Artificial Sequence
  source: /note="Description of Artificial Sequence: Synthetic peptide"
KQGSEKTNVDVEEV

SEQ ID NO: 1603 - protein, 14 aa, Artificial Sequence
  source: /note="Description of Artificial Sequence: Synthetic peptide"
KQGSDKTNVDDAGV

SEQ ID NO: 1604 - protein, 14 aa, Artificial Sequence
  source: /note="Description of Artificial Sequence: Synthetic peptide"
KQGSSKTNVDPREV

SEQ ID NO: 1605 - protein, 14 aa, Artificial Sequence
  source: /note="Description of Artificial Sequence: Synthetic peptide"
KQGSRKTNVDHKQV

SEQ ID NO: 1606 - protein, 14 aa, Artificial Sequence
  source: /note="Description of Artificial Sequence: Synthetic peptide"
KQGSKGGNVDTNRV

SEQ ID NO: 1607 - protein, 14 aa, Artificial Sequence
  source: /note="Description of Artificial Sequence: Synthetic peptide"
KQGSGEANVDNGDV

SEQ ID NO: 1608 - protein, 14 aa, Artificial Sequence
  source: /note="Description of Artificial Sequence: Synthetic peptide"
KQDAAADNIDYDHV

SEQ ID NO: 1609 - protein, 14 aa, Artificial Sequence
  source: /note="Description of Artificial Sequence: Synthetic peptide"
KQSGTRSNAAASSV

SEQ ID NO: 1610 - protein, 14 aa, Artificial Sequence
  source: /note="Description of Artificial Sequence: Synthetic peptide"
KENTNTNDTELTNV

SEQ ID NO: 1611 - protein, 14 aa, Artificial Sequence
  source: /note="Description of Artificial Sequence: Synthetic peptide"
QRGNNVAATADVNT

SEQ ID NO: 1612 - protein, 14 aa, Artificial Sequence
  source: /note="Description of Artificial Sequence: Synthetic peptide"
QRGNNEAATADVNT

SEQ ID NO: 1613 - protein, 14 aa, Artificial Sequence
  source: /note="Description of Artificial Sequence: Synthetic peptide"
QRGNNPAATADVNT

SEQ ID NO: 1614 - protein, 14 aa, Artificial Sequence
  source: /note="Description of Artificial Sequence: Synthetic peptide"
QRGNNHAATADVNT

SEQ ID NO: 1615 - protein, 14 aa, Artificial Sequence
  source: /note="Description of Artificial Sequence: Synthetic peptide"
QEENNIAATPGVNT

SEQ ID NO: 1616 - protein, 14 aa, Artificial Sequence
  source: /note="Description of Artificial Sequence: Synthetic peptide"
QPPNNMAATHEVNT

SEQ ID NO: 1617 - protein, 14 aa, Artificial Sequence
  source: /note="Description of Artificial Sequence: Synthetic peptide"
QHHNNSAATTIVNT

SEQ ID NO: 1618 - protein, 14 aa, Artificial Sequence
  source: /note="Description of Artificial Sequence: Synthetic peptide"
QTTNNRAAFNMVET

SEQ ID NO: 1619 - protein, 14 aa, Artificial Sequence
  source: /note="Description of Artificial Sequence: Synthetic peptide"
QKKNNNAASKKVAT

SEQ ID NO: 1620 - protein, 14 aa, Artificial Sequence
  source: /note="Description of Artificial Sequence: Synthetic peptide"
QGGNNKAADDAVKT

SEQ ID NO: 1621 - protein, 14 aa, Artificial Sequence
  source: /note="Description of Artificial Sequence: Synthetic peptide"
QAAKGGAADDAVKT

SEQ ID NO: 1622 - protein, 14 aa, Artificial Sequence
  source: /note="Description of Artificial Sequence: Synthetic peptide"
QDDRAAAANESVDT

SEQ ID NO: 1623 - protein, 14 aa, Artificial Sequence
  source: /note="Description of Artificial Sequence: Synthetic peptide"
QQQHDDAAYQRVHT

SEQ ID NO: 1624 - protein, 14 aa, Artificial Sequence
  source: /note="Description of Artificial Sequence: Synthetic peptide"
QSSSSLAAVSTVQT

SEQ ID NO: 1625 - protein, 14 aa, Artificial Sequence
  source: /note="Description of Artificial Sequence: Synthetic peptide"
QNNQTTAAIRNVTT

SEQ ID NO: 1626 - protein, 12 aa, Artificial Sequence
  source: /note="Description of Artificial Sequence: Synthetic peptide"
NYNKKSDNVDFT

SEQ ID NO: 1627 - protein, 12 aa, Artificial Sequence
  source: /note="Description of Artificial Sequence: Synthetic peptide"
NYNKKSENVDFT

SEQ ID NO: 1628 - protein, 12 aa, Artificial Sequence
  source: /note="Description of Artificial Sequence: Synthetic peptide"
NYNKKSLNVDFT

SEQ ID NO: 1629 - protein, 12 aa, Artificial Sequence
  source: /note="Description of Artificial Sequence: Synthetic peptide"
NYNKKSPNVDFT

SEQ ID NO: 1630 - protein, 12 aa, Artificial Sequence
  source: /note="Description of Artificial Sequence: Synthetic peptide"
NYSKKSHCVDFT

SEQ ID NO: 1631 - protein, 11 aa, Artificial Sequence
  source: /note="Description of Artificial Sequence: Synthetic peptide"
NYRKTIYVDFT

SEQ ID NO: 1632 - protein, 11 aa, Artificial Sequence
  source: /note="Description of Artificial Sequence: Synthetic peptide"
NYKEKKDVHFT

SEQ ID NO: 1633 - protein, 11 aa, Artificial Sequence
  source: /note="Description of Artificial Sequence: Synthetic peptide"
NYGHRAIVQFT

SEQ ID NO: 1634 - protein, 11 aa, Artificial Sequence
  source: /note="Description of Artificial Sequence: Synthetic peptide"
NYANHQFVVCT

SEQ ID NO: 1635 - protein, 12 aa, Artificial Sequence
  source: /note="Description of Artificial Sequence: Synthetic peptide"
NYDDDPTGVLLT

SEQ ID NO: 1636 - protein, 11 aa, Artificial Sequence
  source: /note="Description of Artificial Sequence: Synthetic peptide"
NYDDPTGVLLT

SEQ ID NO: 1637 - protein, 11 aa, Artificial Sequence
  source: /note="Description of Artificial Sequence: Synthetic peptide"
NFEQQNSVEWT

SEQ ID NO: 1638 - protein, 7 aa, Artificial Sequence
  source: /note="Description of Artificial Sequence: Synthetic peptide"
SQSGASN

SEQ ID NO: 1639 - protein, 6 aa, Artificial Sequence
  source: /note="Description of Artificial Sequence: Synthetic peptide"
NNGSQA

SEQ ID NO: 1640 - protein, 25 aa, Artificial Sequence
  source: /note="Description of Artificial Sequence: Synthetic peptide"
YYLSRTNTPSGTTTWSRLQFSQAGA

SEQ ID NO: 1641 - protein, 16 aa, Artificial Sequence
  source: /note="Description of Artificial Sequence: Synthetic peptide"
SKTSADNNNSEYSWTG

SEQ ID NO: 1642 - protein, 8 aa, Artificial Sequence
  source: /note="Description of Artificial Sequence: Synthetic peptide"
HKDDEEKF

SEQ ID NO: 1643 - protein, 14 aa, Artificial Sequence
  source: /note="Description of Artificial Sequence: Synthetic peptide"
KQGSEKTNVDIEEV

SEQ ID NO: 1644 - protein, 14 aa, Artificial Sequence
  source: /note="Description of Artificial Sequence: Synthetic peptide"
QRGNNQAATADVNT

SEQ ID NO: 1645 - protein, 12 aa, Artificial Sequence
  source: /note="Description of Artificial Sequence: Synthetic peptide"
NYNKKSVNVDFT

SEQ ID NO: 1646 - protein, 42 aa, Artificial Sequence
  source: /note="Description of Artificial Sequence: Synthetic polypeptide"
SQSGASNYNTPSGTTTQSRLQFSTSADNNNSEYSWTGATKYH

SEQ ID NO: 1647 - protein, 42 aa, Artificial Sequence
  source: /note="Description of Artificial Sequence: Synthetic polypeptide"
SASGASNFNSEGGSLTQSSLGFSTDGENNNSDFSWTGATKYH

SEQ ID NO: 1648 - protein, 42 aa, Artificial Sequence
  source: /note="Description of Artificial Sequence: Synthetic polypeptide"
SQSGASNYNTPSGTTTQSRLQFSTDGENNNSDFSWTGATKYH

SEQ ID NO: 1649 - protein, 42 aa, Artificial Sequence
  source: /note="Description of Artificial Sequence: Synthetic polypeptide"
SASGASNYNTPSGTTTQSRLQFSTSADNNNSEFSWPGATTYH

SEQ ID NO: 1650 - protein, 42 aa, Artificial Sequence
  source: /note="Description of Artificial Sequence: Synthetic polypeptide"
SQSGASNFNSEGGSLTQSSLGFSTDGENNNSDFSWTGATKYH

SEQ ID NO: 1651 - protein, 42 aa, Artificial Sequence
  source: /note="Description of Artificial Sequence: Synthetic polypeptide"
SASGASNYNTPSGSLTQSSLGFSTDGENNNSDFSWTGATKYH

SEQ ID NO: 1652 - protein, 42 aa, Artificial Sequence
  source: /note="Description of Artificial Sequence: Synthetic polypeptide"
SQSGASNYNTPSGTTTQSRLQFSTSADNNNSDFSWTGATKYH

SEQ ID NO: 1653 - protein, 42 aa, Artificial Sequence
  source: /note="Description of Artificial Sequence: Synthetic polypeptide"
SGAGASNFNSEGGSLTQSSLGFSTDGENNNSDFSWTGATKYH

SEQ ID NO: 1654 - protein, 7 aa, Artificial Sequence
  source: /note="Description of Artificial Sequence: Synthetic peptide"
SGAGASN

SEQ ID NO: 1655 - protein, 15 aa, Artificial Sequence
  source: /note="Description of Artificial Sequence: Synthetic peptide"
NSEGGSLTQSSLGFS

SEQ ID NO: 1656 - protein, 11 aa, Artificial Sequence
  source: /note="Description of Artificial Sequence: Synthetic peptide"
TDGENNNSDFS

SEQ ID NO: 1657 - protein, 10 aa, Artificial Sequence
  source: /note="Description of Artificial Sequence: Synthetic peptide"
SEFSWPGATT

SEQ ID NO: 1658 - protein, 13 aa, Artificial Sequence
  source: /note="Description of Artificial Sequence: Synthetic peptide"
TSADNNNSDFSWT

SEQ ID NO: 1659 - protein, 8 aa, Artificial Sequence
  source: /note="Description of Artificial Sequence: Synthetic peptide"
SQSGASNY

SEQ ID NO: 1660 - protein, 15 aa, Artificial Sequence
  source: /note="Description of Artificial Sequence: Synthetic peptide"
NTPSGTTTQSRLQFS

SEQ ID NO: 1661 - protein, 19 aa, Artificial Sequence
  source: /note="Description of Artificial Sequence: Synthetic peptide"
TSADNNNSEYSWTGATKYH

SEQ ID NO: 1662 - protein, 8 aa, Artificial Sequence
  source: /note="Description of Artificial Sequence: Synthetic peptide"
SASGASNF

SEQ ID NO: 1663 - protein, 19 aa, Artificial Sequence
  source: /note="Description of Artificial Sequence: Synthetic peptide"
TDGENNNSDFSWTGATKYH

SEQ ID NO: 1664 - protein, 8 aa, Artificial Sequence
  source: /note="Description of Artificial Sequence: Synthetic peptide"
SASGASNY

SEQ ID NO: 1665 - protein, 19 aa, Artificial Sequence
  source: /note="Description of Artificial Sequence: Synthetic peptide"
TSADNNNSEFSWPGATTYH

SEQ ID NO: 1666 - protein, 15 aa, Artificial Sequence
  source: /note="Description of Artificial Sequence: Synthetic peptide"
NTPSGSLTQSSLGFS

SEQ ID NO: 1667 - protein, 19 aa, Artificial Sequence
  source: /note="Description of Artificial Sequence: Synthetic peptide"
TSADNNNSDFSWTGATKYH

SEQ ID NO: 1668 - protein, 8 aa, Artificial Sequence
  source: /note="Description of Artificial Sequence: Synthetic peptide"
SGAGASNF

SEQ ID NO: 1669 - DNA, 48 bp, Artificial Sequence
  source: /note="Description of Artificial Sequence: Synthetic oligonucleotide"
  modified_base (20)..(20): a, c, t, or g
  modified_base (35)..(35): a, c, t, or g
ctccagvvsvvsmrsrvcvnsgcagctdhcvvsrnsgtcvmsacacaa

SEQ ID NO: 1670 - DNA, 48 bp, Artificial Sequence
  source: /note="Description of Artificial Sequence: Synthetic oligonucleotide"
ctccagagaggcaacagacaagcagctaccgcagatgtcaacacacaa

SEQ ID NO: 1671 - protein, 7 aa, Artificial Sequence
  source: /note="Description of Artificial Sequence: Synthetic peptide"
SAAGASN

SEQ ID NO: 1672 - protein, 24 aa, Artificial Sequence
  source: /note="Description of Artificial Sequence: Synthetic peptide"
YFLSRTNTESGSTTQSTLRFSQAG

SEQ ID NO: 1673 - protein, 13 aa, Artificial Sequence
  source: /note="Description of Artificial Sequence: Synthetic peptide"
SKTSADNNNSDFS

SEQ ID NO: 1674 - protein, 14 aa, Artificial Sequence
  source: /note="Description of Artificial Sequence: Synthetic peptide"
KQGSEKTDVDIDKV

SEQ ID NO: 1675 - protein, 7 aa, Artificial Sequence
  source: /note="Description of Artificial Sequence: Synthetic peptide"
STAGASN

SEQ ID NO: 1676 - protein, 24 aa, Artificial Sequence
  source: /note="Description of Artificial Sequence: Synthetic peptide"
YFLSRTNTTSGIETQSTLRFSQAG

SEQ ID NO: 1677 - protein, 13 aa, Artificial Sequence
  source: /note="Description of Artificial Sequence: Synthetic peptide"
SKTDGENNNSDFS

SEQ ID NO: 1678 - protein, 14 aa, Artificial Sequence
  source: /note="Description of Artificial Sequence: Synthetic peptide"
KQGAAADDVEIDGV

SEQ ID NO: 1679 - protein, 7 aa, Artificial Sequence
  source: /note="Description of Artificial Sequence: Synthetic peptide"
SEAGASN

SEQ ID NO: 1680 - protein, 24 aa, Artificial Sequence
  source: /note="Description of Artificial Sequence: Synthetic peptide"
YYLSRTNTPSGTTTQSRLQFSQAG

SEQ ID NO: 1681 - protein, 13 aa, Artificial Sequence
  source: /note="Description of Artificial Sequence: Synthetic peptide"
SKTSADNNNSEYS

SEQ ID NO: 1682 - protein, 14 aa, Artificial Sequence
  source: /note="Description of Artificial Sequence: Synthetic peptide"
KQGSEKTNVDIEKV

SEQ ID NO: 1683 - protein, 24 aa, Artificial Sequence
  source: /note="Description of Artificial Sequence: Synthetic peptide"
YFLSRTNDASGSDTKSTLLFSQAG

SEQ ID NO: 1684 - protein, 13 aa, Artificial Sequence
  source: /note="Description of Artificial Sequence: Synthetic peptide"
STTPSENNNSEYS

SEQ ID NO: 1685 - protein, 7 aa, Artificial Sequence
  source: /note="Description of Artificial Sequence: Synthetic peptide"
SAAGATN

SEQ ID NO: 1686 - protein, 24 aa, Artificial Sequence
  source: /note="Description of Artificial Sequence: Synthetic peptide"
YFLSRTNGEAGSATLSELRFSQAG

SEQ ID NO: 1687 - protein, 8 aa, Artificial Sequence
  source: /note="Description of Artificial Sequence: Synthetic peptide"
HGDDADRF

SEQ ID NO: 1688 - protein, 14 aa, Artificial Sequence
  source: /note="Description of Artificial Sequence: Synthetic peptide"
KQGAEKSDVEVDRV

SEQ ID NO: 1689 - protein, 14 aa, Artificial Sequence
  source: /note="Description of Artificial Sequence: Synthetic peptide"
KQDSGGDNIDIDQV

SEQ ID NO: 1690 - protein, 7 aa, Artificial Sequence
  source: /note="Description of Artificial Sequence: Synthetic peptide"
SDAGASN

SEQ ID NO: 1691 - protein, 24 aa, Artificial Sequence
  source: /note="Description of Artificial Sequence: Synthetic peptide"
YFLSRTNTEGGHDTQSTLRFSQAG

SEQ ID NO: 1692 - protein, 14 aa, Artificial Sequence
  source: /note="Description of Artificial Sequence: Synthetic peptide"
KEDGGGSDVAIDEV

SEQ ID NO: 1693 - protein, 7 aa, Artificial Sequence
  source: /note="Description of Artificial Sequence: Synthetic peptide"
SNAGASN

SEQ ID NO: 1694 - protein, 24 aa, Artificial Sequence
  source: /note="Description of Artificial Sequence: Synthetic peptide"
YFLSRTNGEAGSATLSELRFSQPG

SEQ ID NO: 1695 - DNA, 21 bp, Artificial Sequence
  source: /note="Description of Artificial Sequence: Synthetic oligonucleotide"
agcvvmdcaggarscascaac

SEQ ID NO: 1696 - DNA, 18 bp, Artificial Sequence
  source: /note="Description of Artificial Sequence: Synthetic oligonucleotide"
aacracrrsmrsmaggca

SEQ ID NO: 1697 - DNA, 24 bp, Artificial Sequence
  source: /note="Description of Artificial Sequence: Synthetic oligonucleotide"
cacrrggacrrcrmsrrsarsttt

SEQ ID NO: 1698 - DNA, 75 bp, Artificial Sequence
  source: /note="Description of Artificial Sequence: Synthetic oligonucleotide"
  modified_base (35)..(35): a, c, t, or g
tatttcttgagcagaacaaacrvcvvsrscggamncvhsacgmhstcavvscttvdsttttctcagsbcrgsgcg

SEQ ID NO: 1699 - DNA, 48 bp, Artificial Sequence
  source: /note="Description of Artificial Sequence: Synthetic oligonucleotide"
  modified_base (11)..(11): a, c, t, or g
tcaamammavnsrvcsrsaacaacaacagtrasttctcgtggmmagga

SEQ ID NO: 1700 - DNA, 42 bp, Artificial Sequence
  source: /note="Description of Artificial Sequence: Synthetic oligonucleotide"
  modified_base (31)..(31): a, c, t, or g
aagsaarrcrscrvsrvarvcratrycgmsnhcrvmvrsgtc

SEQ ID NO: 1701 - DNA, 42 bp, Artificial Sequence
  source: /note="Description of Artificial Sequence: Synthetic oligonucleotide"
  modified_base (17)..(17): a, c, t, or g
  modified_base (32)..(32): a, c, t, or g
cagvvsvvsmrsrvcvnsgcagctdhcvvsrnsgtcvmsaca

SEQ ID NO: 1702 - DNA, 33 bp, Artificial Sequence
  source: /note="Description of Artificial Sequence: Synthetic oligonucleotide"
aactwcrvsvasmvsvhsddtgtgswstksact

SEQ ID NO: 1703 - DNA, 30 bp, Artificial Sequence
  source: /note="Description of Artificial Sequence: Synthetic oligonucleotide"
ttgttgaacatcaccacgtgacgcacgttc

SEQ ID NO: 1704 - DNA, 30 bp, Artificial Sequence
  source: /note="Description of Artificial Sequence: Synthetic oligonucleotide"
tccccgtggttctactacataatgtggccg

SEQ ID NO: 1705 - DNA, 30 bp, Artificial Sequence
  source: /note="Description of Artificial Sequence: Synthetic oligonucleotide"
ttccacactccgttttggataatgttgaac

SEQ ID NO: 1706 - DNA, 30 bp, Artificial Sequence
  source: /note="Description of Artificial Sequence: Synthetic oligonucleotide"
agggacatccccagctccatgctgtggtcg

SEQ ID NO: 1707 - DNA, 30 bp, Artificial Sequence
  source: /note="Description of Artificial Sequence: Synthetic oligonucleotide"
agggacaacccctccgactcgccctaatcc

SEQ ID NO: 1708 - DNA, 30 bp, Artificial Sequence
  source: /note="Description of Artificial Sequence: Synthetic oligonucleotide"
tcctagtagaagacaccctctcactgcccg

SEQ ID NO: 1709 - DNA, 30 bp, Artificial Sequence
  source: /note="Description of Artificial Sequence: Synthetic oligonucleotide"
agtaccatgtacacccactctcccagtgcc

SEQ ID NO: 1710 - DNA, 30 bp, Artificial Sequence
  source: /note="Description of Artificial Sequence: Synthetic oligonucleotide"
atatggacgttcatgctgatcaccataccg

SEQ ID NO: 1711 - DNA, 30 bp, Artificial Sequence
  source: /note="Description of Artificial Sequence: Synthetic oligonucleotide"
agcaggagctccttggcctcagcgtgcgag

SEQ ID NO: 1712 - DNA, 30 bp, Artificial Sequence
  source: /note="Description of Artificial Sequence: Synthetic oligonucleotide"
acaagcagcttcactatgacaaccactgac

SEQ ID NO: 1713 - DNA, 284 bp, Artificial Sequence
  source: /note="Description of Artificial Sequence: Synthetic polynucleotide"
  modified_base (59)..(59): a, c, t, or g
  modified_base (244)..(244): a, c, t, or g
cagcctaggaactggcttcctggaccctgttaccgccagcagagagtctcaamammavnsrvcsrsaacaacaacagtrasttctcctggmmaggagctaccaagtaccacctcaatggcagagactctctggtgaatcccggaccagctatggcaagccacrrggacrrcrmsrrsarsttttttcctcagagcggggttctcatctttgggaagsaarrcrscrvsrvarvcratrycgmsnhcrvmvrsgtcatgattacagacgaagaggagatctggac

SEQ ID NO: 1714 - DNA, 34 bp, Artificial Sequence
  source: /note="Description of Artificial Sequence: Synthetic oligonucleotide"
tgggacaatggcggtcgtctctcagagttktkkt

SEQ ID NO: 1715 - DNA, 35 bp, Artificial Sequence
  source: /note="Description of Artificial Sequence: Synthetic oligonucleotide"
agaggacckktcctcgatggttcatggtggagtta

SEQ ID NO: 1716 - DNA, 31 bp, Artificial Sequence
  source: /note="Description of Artificial Sequence: Synthetic oligonucleotide"
ccacttagggcctggtcgataccgttcggtg

SEQ ID NO: 1717 - DNA, 32 bp, Artificial Sequence
  source: /note="Description of Artificial Sequence: Synthetic oligonucleotide"
tctcgccccaagagtagaaacccttcsttyyg

SEQ ID NO: 1718 - protein, 735 aa, Adeno-associated virus 2 [sequence omitted]

SEQ ID NO: 1719 - protein, 736 aa, Adeno-associated virus 9; identical to SEQ ID NO: 134

SEQ ID NO: 1720 - protein, 7 aa, Artificial Sequence
  source: /note="Description of Artificial Sequence: Synthetic peptide"
GSTPPPM

SEQ ID NO: 1721 - protein, 7 aa, Artificial Sequence
  source: /note="Description of Artificial Sequence: Synthetic peptide"
GETRAPL

SEQ ID NO: 1722 - protein, 6 aa, Artificial Sequence
  source: /note="Description of Artificial Sequence: Synthetic peptide"
SPAKFA

SEQ ID NO: 1723 - protein, 6 aa, Artificial Sequence
  source: /note="Description of Artificial Sequence: Synthetic peptide"
NKDKLN

SEQ ID NO: 1724 - DNA, 12 bp, Artificial Sequence
  source: /note="Description of Artificial Sequence: Synthetic oligonucleotide"
agaaagaggcga

SEQ ID NO: 1725 - DNA, 12 bp, Artificial Sequence
  source: /note="Description of Artificial Sequence: Synthetic oligonucleotide"
cgggccaagcgg

SEQ ID NO: 1726 - DNA, 54 bp, Artificial Sequence
  source: /note="Description of Artificial Sequence: Synthetic oligonucleotide"
gagggcagaggaagtcttctaacatgcggtgacgtggaggagaatcccggccct

SEQ ID NO: 1727 - DNA, 75 bp, Artificial Sequence
  source: /note="Description of Artificial Sequence: Synthetic oligonucleotide"
ggaagcggagtgaaacagactttgaattttgaccttctcaagttggcgggagacgtggagtccaaccctggacct

SEQ ID NO: 1728 - DNA, 66 bp, Artificial Sequence
  source: /note="Description of Artificial Sequence: Synthetic oligonucleotide"
ggaagcggagctactaacttcagcctgctgaagcaggctggagacgtggaggagaaccctggacct

SEQ ID NO: 1729 - DNA, 18 bp, Artificial Sequence
  source: /note="Description of Artificial Sequence: Synthetic oligonucleotide"
tccggaggcggcggcagc

SEQ ID NO: 1730 - DNA, 45 bp, Artificial Sequence
  source: /note="Description of Artificial Sequence: Synthetic oligonucleotide"
ggtggtggtggtagcggcggcggcggctctggtggtggtggatcc

SEQ ID NO: 1731 - DNA, 75 bp, Artificial Sequence
  source: /note="Description of Artificial Sequence: Synthetic oligonucleotide"
ggcggaggtggctccggaggcggaggcagcggcggaggtgggtctggcggaggcgggtgcggcggaggtggctcc

SEQ ID NO: 1732 - DNA, 609 bp, Artificial Sequence
  source: /note="Description of Artificial Sequence: Synthetic polynucleotide"
aattccgcccctctcccccccccccctctccctcccccccccctaacgttactggccgaagccgcttggaataaggccggtgtgcgtttgtctatatgttattttccaccatattgccgtcttttggcaatgtgagggcccggaaacctggccctgtcttcttgacgagcattcctaggggtctttcccctctcgccaaaggaatgcaaggtctgttgaatgtcgtgaaggaagcagttcctctggaagcttcttgaagacaaacaacgtctgtagcgaccctttgcaggcagcggaaccccccacctggcgacaggtgcctctgcggccaaaagccacgtgtataagatacacctgcaaaggcggcacaaccccagtgccacgttgtgagttggatagttgtggaaagagtcaaatggctctcctcaagcgtattcaacaaggggctgaaggatgcccagaaggtaccccattgtatgggatctgatctggggcctcggtgcacatgctttacatgtgtttagtcgaggttaaaaaaacgtctaggccccccgaaccacggggacgtggttttcctttgaaaaacacgatgataatatggccacaacc

SEQ ID NO: 1733 - DNA, 623 bp, Artificial Sequence
  source: /note="Description of Artificial Sequence: Synthetic polynucleotide"
taacgaattccgcccctctcccccccccccctctccctcccccccccctaacgttactggccgaagccgcttggaataaggccggtgtgcgtttgtctatatgttattttccaccatattgccgtcttttggcaatgtgagggcccggaaacctggccctgtcttcttgacgagcattcctaggggtctttcccctctcgccaaaggaatgcaaggtctgttgaatgtcgtgaaggaagcagttcctctggaagcttcttgaagacaaacaacgtctgtagcgaccctttgcaggcagcggaaccccccacctggcgacaggtgcctctgcggccaaaagccacgtgtataagatacacctgcaaaggcggcacaaccccagtgccacgttgtgagttggatagttgtggaaagagtcaaatggctctcctcaagcgtattcaacaaggggctgaaggatgcccagaaggtaccccattgtatgggatctgatctggggcctcggtgcacatgctttacatgtgtttagtcgaggttaaaaaaacgtctaggccccccgaaccacggggacgtggttttcctttgaaaaacacgatgataatatggccacaaccgccgccacc

SEQ ID NO: 1734 - DNA, 54 bp, Artificial Sequence
  source: /note="Description of Artificial Sequence: Synthetic oligonucleotide"
gtggagaggaagtgctgcgtggagtgcccaccatgccctgcccctcctgtggcc

SEQ ID NO: 1735 - DNA, 108 bp, Artificial Sequence
  source: /note="Description of Artificial Sequence: Synthetic polynucleotide"
gagctcaaaaccccacttggtgacacaactcacacatgcccacggtgcccagagcccaaatcttgtgacacacctcccccgtgcccacggtgcccagcacctgaactc

SEQ ID NO: 1736 - DNA, 153 bp, Artificial Sequence
  source: /note="Description of Artificial Sequence: Synthetic polynucleotide"
gagctcaaaaccccacttggtgacacaactcacacatgcccacggtgcccagagcccaaatcttgtgacacacctcccccgtgcccacggtgcccagagcccaaatcttgtgacacacctcccccatgcccacggtgcccagcacctgaactc

SEQ ID NO: 1737 - DNA, 198 bp, Artificial Sequence
  source: /note="Description of Artificial Sequence: Synthetic polynucleotide"
gagctcaaaaccccacttggtgacacaactcacacatgcccacggtgcccagagcccaaatcttgtgacacacctcccccgtgcccacggtgcccagagcccaaatcttgtgacacacctcccccatgcccacggtgcccagagcccaaatcttgtgacacacctcccccgtgcccaaggtgcccagcacctgaactc

SEQ ID NO: 1738 - DNA, 45 bp, Artificial Sequence
  source: /note="Description of Artificial Sequence: Synthetic oligonucleotide"
gtgcccagggattgtggttgtaagccttgcatatgtacagtccca

SEQ ID NO: 1739 - DNA, 18 bp, Artificial Sequence
  source: /note="Description of Artificial Sequence: Synthetic oligonucleotide"
gtgcccagggattgtggt

SEQ ID NO: 1740 - protein, 5 aa, Artificial Sequence
  source: /note="Description of Artificial Sequence: Synthetic peptide"
GGGGS

SEQ ID NO: 1741 - protein, 15 aa, Artificial Sequence
  source: /note="Description of Artificial Sequence: Synthetic peptide"
GGGGSGGGGSGGGGS

SEQ ID NO: 1742 - protein, 25 aa, Artificial Sequence
  source: /note="Description of Artificial Sequence: Synthetic peptide"
GGGGSGGGGSGGGGSGGGGSGGGGS

SEQ ID NO: 1743 - protein, 50 aa, Artificial Sequence
  source: /note="Description of Artificial Sequence: Synthetic polypeptide"
  SITE (1)..(50): /note="This sequence may encompass 1-10 'Gly Gly Gly Gly Ser' repeating units"
GGGGSGGGGSGGGGSGGGGSGGGGSGGGGSGGGGSGGGGSGGGGSGGGGS

We claim:

1. An AAV particle comprising:
(a) a vector genome, wherein the vector genome comprises:
(i) at least one Vectorized Editing of Nucleic acids to correct Overt Mutations (VENOM) element, and
(ii) at least one payload;
(b) a capsid.

2. The AAV particle of claim 1, wherein the at least one VENOM element comprises a polynucleotide encoding at least one guide RNA (gRNA) and a promoter, wherein the expression of the at least one guide gRNA is driven by the promoter.

3. The AAV particle of claim 1, wherein the at least one VENOM element comprises a polynucleotide encoding a first guide RNA, a second guide RNA, a donor template and a promoter, wherein the expression of the first guide RNA, the second guide RNA and the donor template are driven by the promoter.

4. The AAV particle of claim 2 or 3, wherein the promoter is an RNA polymerase III-dependent promoter.

5. The AAV particle of claim 1, wherein the at least one VENOM element comprises a polynucleotide encoding an enzyme and a promoter, wherein the enzyme is selected from the group consisting of Cas9, Cas9 orthologue, Cpf1 (Cas12a), Cpf1 (Cas12a) orthologue, Cas13, Cas13 orthologue, Cas13b and Cas13b orthologue.

6. The AAV particle of claim 5, wherein the expression of the enzyme is driven by the promoter, and wherein the promoter is selected from the group consisting of ubiquitous promoter and tissue-specific promoter.

7. The AAV particle of claim 6, wherein the promoter is a ubiquitous promoter.

8. The AAV particle of claim 6, wherein the promoter is a tissue-specific promoter.

9. The AAV particle of any of claims 5-8, wherein the at least one VENOM element comprises the polynucleotide encoding Cas9.

10. The AAV particle of claim 8, wherein the at least one VENOM element comprises the polynucleotide encoding Cas9, and wherein the expression of Cas9 is driven by the tissue-specific promoter.

11. The AAV particle of claim 10, wherein the tissue-specific promoter is a neuron specific promoter.

12. The AAV particle of claim 10, wherein the tissue-specific promoter is a muscle specific promoter.

13. The AAV particle of claim 10, wherein the tissue-specific promoter is a cardiac specific promoter.

14. The AAV particle of claim 10, wherein the tissue-specific promoter is a liver specific promoter.

15. The AAV particle of claim 9, wherein the expression of Cas9 is driven by a constitutive promoter.

16. The AAV particle of claim 9, wherein the expression of Cas9 is driven by an inducible promoter.

17. The AAV particle of any one of claims 9-16, wherein the polynucleotide further encodes at least one gRNA, wherein the expression of the at least one gRNA is driven by an RNA polymerase III-dependent promoter.

18. The AAV particle of any one of claims 5-8, wherein the at least one VENOM element comprises the polynucleotide encoding a Cas9 orthologue.

19. The AAV particle of any of claims 5-8, wherein the at least one VENOM element comprises the polynucleotide encoding Cpf1 (Cas12a).

20. The AAV particle of claim 8, wherein the at least one VENOM element comprises the polynucleotide encoding Cpf1 (Cas12a), and wherein the expression of Cpf1 (Cas12a) is driven by the tissue-specific promoter.

21. The AAV particle of claim 20, wherein the tissue-specific promoter is a neuron specific promoter.

22. The AAV particle of claim 20, wherein the tissue-specific promoter is a muscle specific promoter.

23. The AAV particle of claim 20, wherein the tissue-specific promoter is a cardiac specific promoter.

24. The AAV particle of claim 20, wherein the tissue-specific promoter is a liver specific promoter.

25. The AAV particle of claim 20, wherein the expression of Cpf1 (Cas12a) is driven by a constitutive promoter.

26. The AAV particle of claim 20, wherein the expression of Cpf1 (Cas12a) is driven by an inducible promoter.

27. The AAV particle of any one of claims 19-26, wherein the polynucleotide further encodes at least one gRNA, wherein the expression of the at least one gRNA is driven by an RNA polymerase III-dependent promoter.

28. A method of modulating the expression level or the sequence of a gene in a cell from a subject by contacting the cell with an effective amount of at least one AAV particle of any one of claims 1-27.

29. The method of claim 28, wherein modulating the expression level of the gene is suppressing the expression level of the gene.

30. The method of claim 28, wherein modulating the expression level of the gene is stimulating the expression level of the gene.

31. The method of claim 28, wherein modulating the sequence of the gene comprises correcting one or more mutations of the gene, a frameshift mutation which causes a premature stop codon or a truncated gene product, a disrupted reading frame via gene deletion, an aberrant splice acceptor site, or an aberrant splice donor site.

32. The method of claim 31, wherein modulating the sequence of the gene comprises correcting one or more point-mutations of the gene.

33. The method of claim 32, wherein modulating the sequence of the gene comprises contacting the cell with the AAV particle and a DNA donor, wherein the AAV particle comprises a viral genome encoding a first gRNA, a second gRNA, a DNA donor, a first promoter, a second promoter, a third promoter, wherein the expression of the first gRNA is controlled by the first promoter, the expression of the second gRNA is controlled by the second promoter, wherein the donor DNA comprises a single-strand oligonucleotide of 100-200 bp.

34. The method of claim 28, wherein modulating the sequence of the gene comprises inserting the full-length sequence or fragment of the gene.

35. The method of claim 34, wherein modulating the sequence of the gene comprises inserting 1-500 nucleotides of the gene.

36. The method of claim 34, wherein modulating the sequence of the gene comprises inserting 501-1000 nucleotides of the gene.

37. The method of claim 34, wherein modulating the sequence of the gene comprises inserting 1001-2000 nucleotides of the gene.

38. The method of any one of claims 34-37, wherein modulating the sequence of the gene comprises contacting the cell with the AAV particle comprising a viral genome encoding a first gRNA, a second gRNA, a DNA donor, a first promoter, a second promoter, a third promoter, wherein the expression of the first gRNA is driven by the first promoter, the expression of the second gRNA is driven by the second promoter, and the expression of the DNA donor is driven by the third promoter.

39. The method of any of claims 33-38, wherein the modulation of the sequence the sequence comprises homology-directed repair.

40. The method of claim 28, wherein modulating the sequence of the gene comprises deleting the full-length or fragment of the gene.

41. The method of claim 40, wherein modulating the sequence of the gene comprises deleting 1-500 nucleotides of the gene.

42. The method of claim 40, wherein modulating the sequence of the gene comprises deleting 501-1000 nucleotides of the gene.

43. The method of claim 40, wherein modulating the sequence of the gene comprises deleting 1001-2000 nucleotides of the gene.

44. The method of any one of claims 39-43, wherein modulating the sequence of the gene comprises contacting the cell with the AAV particle comprising a viral genome encoding a first gRNA, a second gRNA, a first promoter, a second promoter, wherein the expression of the first gRNA is controlled by the first promoter, the expression of the second gRNA is controlled by the second promoter.

45. The method of claim 41, wherein modulating the sequence of the gene comprises contacting the cell with the AAV particle comprising a viral genome encoding one or more gRNA, wherein the modulation of the sequence of the gene comprises an indel mutation.

46. The method of any one of claims 41-44, wherein the correction of the gene comprises non-homologous end joining repair.

47. The method of any one of claims of 28-46, wherein modulating the sequence of the gene comprises contacting the cell with the AAV particle comprising a viral genome comprising a polynucleotide further encoding Cas9 or Cpf1 (Cas12a).

48. The method of claim 47, wherein the cell is a neuronal cell, a neural stem cell, an astrocyte, an oligodendrocyte, a microglial cell, a retinal cell, a tumor cell, a hematopoietic stem cell, an insulin producing beta cell, a lung epithelium cell, an endothelial cell, a liver cell, a skeletal muscle cell, a muscle stem cell, a muscle satellite cell, or a cardiac muscle cell.

49. The method of any of claims 28-48, wherein the subject has a neurological disease.

50. The method of claim 49, wherein the neurological disease is Parkinson's disease.

51. The method of claim 49, wherein the neurological disease is Friedreich's Ataxia.

52. The method of claim 49, wherein the neurological disease is Amyotrophic lateral sclerosis (ALS).

53. The method of claim 49, wherein the neurological disease is Huntington's disease.

54. The method of claim 49, wherein the neurological disease is Spinal muscular atrophy (SMA).

55. The method of any of claims 28-48, wherein the subject has a muscular disease.

56. The method of claim 55, wherein the muscular disease is Duchenne muscular disease.

57. The method of any of claims 28-48, wherein the subject has a cancer.
